(19) United States
(12) Patent Application Publication
(10) Pub. No.: US 2005/0196784 A1
(43) Pub. Date: Sep. 8, 2005

(54) Human Type II diabetes gene - Kv channel-interacting protein (KChIP1) located on chromosome 5

(75) Inventors: Inga Reynisdottir, Reykjavik (IS); Jeffrey R. Gulcher, Lake Barrington, IL (US); Struan F. Grant, Reykjavik (IS); Gudmar Thorleifsson, Reykjavik (IS)

Correspondence Address: HAMILTON, BROOK, SMITH & REYNOLDS, P.C., 530 VIRGINIA ROAD, P.O. BOX 9133, CONCORD, MA, 01742-9133, US

(73) Assignee: deCODE genetics ehf., Reykjavik (IS)

(21) Appl. No.: 11/029,984

(22) Filed: Jan. 5, 2005

Related U.S. Application Data
(63) Continuation-in-part of application No. 10/976,368, filed on Oct. 28, 2004.
Application No. 10/976,368 is a continuation-in-part of application No. 10/820,226, filed on Apr. 7, 2004.
Application No. 10/820,226 is a continuation-in-part of application No. PCT/US03/34681, filed on Oct. 31, 2003.
(60) Provisional application No. 60/477,111, filed on Jun. 9, 2003.
(60) Provisional application No. 60/449,945, filed on Feb. 25, 2003.
(60) Provisional application No. 60/423,545, filed on Nov. 1, 2002.

(51) Int. Cl. C12Q 1/68

(52) U.S. Cl. 435/6

(57) ABSTRACT

Association of Type II diabetes and a locus on chromosome 5 is disclosed. In particular, the gene KChIP1 within this locus is shown by linkage analysis to be a susceptibility gene for Type II diabetes. Pathway targeting for drug delivery and diagnosis applications in identifying those who have Type II diabetes or are at risk of developing Type II diabetes, in particular those that are non-obese are described.

### RELATED APPLICATIONS

[0001] This application is a continuation-in-part of U.S. application Ser. No. 10/976,368, filed Oct. 28, 2004, which is a continuation-in-part of U.S. application Ser. No. 10/820,226, filed Apr. 7, 2004, which is a continuation-in-part of International Application No. PCT/US03/34681, which designated the United States and was filed on Oct. 31, 2003, published in English, which claims priority to U.S. Provisional Application No. 60/477,111 filed Jun. 9, 2003, and to U.S. Provisional Application No. 60/449,945, filed on Feb. 25, 2003, and also to U.S. Provisional Application No. 60/423,545, filed on Nov. 1, 2002, the entire contents of all applications are incorporated herein by reference.

### BACKGROUND OF THE INVENTION

[0002] Diabetes mellitus, a metabolic disease wherein carbohydrate utilization is reduced and lipid and protein utilization is enhanced, is caused by an absolute or relative deficiency of insulin. In the more severe cases, diabetes is characterized by chronic hyperglycemia, glycosuria, water and electrolyte loss, ketoacidosis and coma. Long term complications include development of neuropathy, retinopathy, nephropathy, generalized degenerative changes in large and small blood vessels and increased susceptibility to infection. The most common form of diabetes is Type II, non-insulin-dependent diabetes that is characterized by hyperglycemia due to impaired insulin secretion and insulin resistance in target tissues. Both genetic and environmental factors contribute to the disease. For example, obesity plays a major role in the development of the disease. Type II diabetes is often a mild form of diabetes mellitus of gradual onset.

[0003] The health implications of Type II diabetes are enormous. In 1995, there were 135 million adults with diabetes worldwide. It is estimated that close to 300 million will have diabetes in the year 2025. (King H., et al., Diabetes Care, 21(9): 1414-1431 (1998)). The prevalence of Type II diabetes in the adult population in Iceland is 2.5% (Vilbergsson, S., et al., Diabet. Med., 14(6): 491-498 (1997)), which comprises approximately 5,000 people over the age of 34 who have the disease. The high prevalence of the disease and increasing population affected shows an unmet medical need to define the genetic factors involved in Type II diabetes to more precisely define the associated risk factors. Also needed are therapeutic agents for prevention of Type II diabetes.

### SUMMARY OF THE INVENTION

[0004] As described herein, a locus on chromosome 5q35 has been demonstrated to play a major role in Type II diabetes. The locus, referred to as the Type II diabetes locus, comprises a nucleic acid that encodes, KChIP1.

[0005] The present invention relates to genes located within the Type II diabetes-related locus, particularly nucleic acids comprising the KChIP1 gene, and the amino acids encoded by these nucleic acids. The invention further relates to pathway targeting for drug delivery and diagnosis of individuals with Type II diabetes and those at risk of developing Type II diabetes. Also described are haplotypes and SNPs that can be used to identify individuals with Type II diabetes or at risk of developing Type II diabetes, particularly in those that are non-obese. As a consequence, intervention, for example, dietary changes, exercise and/or medication, can be prescribed to these individuals before symptoms of the disease present. Identification of genes in the Type II diabetes locus can pave the way for a better understanding of the disease process, which in turn can lead to improved diagnostics and therapeutics.

[0006] The present invention pertains to methods of diagnosing a susceptibility to Type II diabetes in an individual, comprising detecting a polymorphism in a KChIP1 nucleic acid, wherein the presence of the polymorphism in the nucleic acid is indicative of a susceptibility to Type II diabetes. The invention additionally pertains to methods of diagnosing Type II diabetes in an individual, comprising detecting a polymorphism in a KChIP1 nucleic acid, wherein the presence of the polymorphism in the nucleic acid is indicative of Type II diabetes. In one embodiment, in diagnosing Type II diabetes or susceptibility to Type II diabetes by detecting the presence of a polymorphism in a KChIP1 nucleic acid, the presence of the polymorphism in the KChIP1 nucleic acid can be indicated, for example, by the presence of one or more of the polymorphisms indicated in Table 10.

[0007] In other embodiments, the invention relates to methods of diagnosing a susceptibility to Type II diabetes in an individual, comprising detecting an alteration in the expression or composition of a polypeptide encoded by a KChIP1 nucleic acid in a test sample, in comparison with the expression or composition of a polypeptide encoded by a KChIP1 nucleic acid in a control sample, wherein the presence of an alteration in expression or composition of the polypeptide in the test sample is indicative of a susceptibility to Type II diabetes. The invention additionally relates to a method of diagnosing Type II diabetes in an individual, comprising detecting an alteration in the expression or composition of a polypeptide encoded by a KChIP1 nucleic acid in a test sample, in comparison with the expression or composition of a polypeptide encoded by KChIP1 nucleic acid in a control sample, wherein the presence of an alteration in expression or composition of the polypeptide in the test sample is indicative of Type II diabetes.

[0008] The invention also relates to an isolated nucleic acid molecule comprising a KChIP1 nucleic acid (e.g., SEQ ID NO: 1 or the complement of SEQ ID NO:1). In certain embodiments, the KChIP1 nucleic acid comprises one or more nucleotide sequence(s) selected from the group of nucleic acid sequences as shown in Table 10, (e.g., SEQ ID NOs: 114-258), and the complements of the group of nucleic acid sequences as shown in Table 10. For example, in certain embodiments, the nucleotide sequence contains one or more polymorphism(s), such as those shown in Table 10. In another embodiment, the invention relates to an isolated nucleic acid molecule which hybridizes under high stringency conditions to a nucleotide sequence selected from the group of SEQ ID NO: 1 and the complement of SEQ ID NO: 1. In certain embodiments, the isolated nucleic acid molecule hybridizes under high stringency conditions to a nucleotide sequence comprising one or more nucleotide sequence(s) selected from the group of nucleic acid sequences as shown in Table 10 (e.g., SEQ ID NOs: 114-258) and the complements of the group of nucleic acid sequences as shown in Table 10. For example, in certain embodiments, the nucleotide sequence contains one or more polymorphism(s), such as those shown in Table 10.

[0009] Also contemplated by the invention is a method of assaying for the presence of a first nucleic acid molecule in a sample, comprising contacting said sample with a second nucleic acid molecule, where the second nucleic acid molecule comprises at least one (or more) nucleic acid sequence(s) selected from the group of SEQ ID NOs: 1 and 114-258, inclusive, wherein the nucleic acid sequence hybridizes to the first nucleic acid under high stringency conditions. In certain embodiments, the second nucleic acid molecule contains one or more polymorphism(s), such as those shown in Table 10.

[0010] The invention also relates to a vector comprising an isolated nucleic acid molecule of the invention (e.g., SEQ ID NOs: 1 and 114-258; optionally including one or more of the polymorphisms shown in Table 10) operably linked to a regulatory sequence, as well as to a recombinant host cell comprising the vector. The invention also provides a method for producing a polypeptide encoded by an isolated nucleic acid molecule having a polymorphism, comprising culturing the recombinant host cell under conditions suitable for expression of the nucleic acid molecule.

[0011] Also contemplated by the invention is a method of assaying for the presence of a polypeptide encoded by an isolated nucleic acid molecule of the invention in a sample, the method comprising contacting the sample with an antibody that specifically binds to the encoded polypeptide.

[0012] The invention further pertains to a method of identifying an agent that alters expression of a KChIP1 nucleic acid, comprising: contacting a solution containing a nucleic acid comprising the promoter region of the KChIP1 gene operably linked to a reporter gene, with an agent to be tested; assessing the level of expression of the reporter gene in the presence of the agent; and comparing the level of expression of the reporter gene in the presence of the agent with a level of expression of the reporter gene in the absence of the agent; wherein if the level of expression of the reporter gene in the presence of the agent differs, by an amount that is statistically significant, from the level of expression in the absence of the agent, then the agent is an agent that alters expression of the KChIP1 gene or nucleic acid. An agent identified by this method is also contemplated.

[0013] The invention additionally comprises a method of identifying an agent that alters expression of a KChIP1 nucleic acid, comprising contacting a solution containing a nucleic acid of the invention or a derivative or fragment thereof, with an agent to be tested; comparing expression of the nucleic acid, derivative or fragment in the presence of the agent with expression of the nucleic acid, derivative or fragment in the absence of the agent; wherein if expression of the nucleic acid, derivative or fragment in the presence of the agent differs, by an amount that is statistically significant, from the expression in the absence of the agent, then the agent is an agent that alters expression of the KChIP1 nucleic acid. In certain embodiments, the expression of the nucleic acid, derivative or fragment in the presence of the agent comprises expression of one or more splicing variants(s) that differ in kind or in quantity from the expression of one or more splicing variant(s) the absence of the agent. Agents identified by this method are also contemplated.

[0014] Representative agents that alter expression of a KChIP1 nucleic acid contemplated by the invention include, for example, antisense nucleic acids to a KChIP1 gene or nucleic acid; a KChIP1 gene or nucleic acid; a KChIP1 polypeptide; a KChIP1 gene or nucleic acid receptor, or other receptor; a KChIP1 binding agent; a peptidomimetic; a fusion protein; a prodrug thereof; an antibody; and a ribozyme. A method of altering expression of a KChIP1 nucleic acid, comprising contacting a cell containing a nucleic acid with such an agent is also contemplated.

[0015] The invention further pertains to a method of identifying a polypeptide which interacts with a KChIP1 polypeptide (e.g., a KChIP1 polypeptide encoded by a nucleic acid of the invention, such as a nucleic acid comprising one or more polymorphism(s) indicated in Table 10), comprising employing a yeast two-hybrid system using a first vector which comprises a nucleic acid encoding a DNA binding domain and a KChIP1 polypeptide, splicing variant, or a fragment or derivative thereof, and a second vector which comprises a nucleic acid encoding a transcription activation domain and a nucleic acid encoding a test polypeptide. If transcriptional activation occurs in the yeast two-hybrid system, the test polypeptide is a polypeptide, which interacts with a KChIP1 polypeptide.

[0016] In certain methods of the invention, a Type II diabetes therapeutic agent is used. The Type II diabetes therapeutic agent can be an agent that alters (e.g., enhances or inhibits) KChIP1 polypeptide activity and/or KChIP1 nucleic acid expression, as described herein (e.g., a nucleic acid agonist or antagonist).

[0017] Type II diabetes therapeutic agents can alter polypeptide activity or nucleic acid expression of a KChIP1 nucleic acid by a variety of means, such as, for example, by providing additional polypeptide or upregulating the transcription or translation of the nucleic acid encoding the KChIP1 polypeptide; by altering posttranslational processing of the KChIP1 polypeptide; by altering transcription of splicing variants; or by interfering with polypeptide activity (e.g., by binding to the KChIP1 polypeptide, or by binding to another polypeptide that interacts with KChIP1, such as a KChIP1 binding agent as described herein), by altering (e.g., downregulating) the expression, transcription or translation of a nucleic acid encoding KChIP1; or by altering interaction among KChIP1 and a KChIP1 binding agent.

[0018] In a further embodiment, the invention relates to Type II diabetes therapeutic agent, such as an agent selected from the group consisting of: a KChIP1 nucleic acid or fragment or derivative thereof; a polypeptide encoded by a KChIP1 nucleic acid (e.g., encoded by a KChIP1 nucleic acid having one or more polymorphism(s) such as those set forth in Table 10); a KChIP1 receptor; a KChIP1 binding agent; a peptidomimetic; a fusion protein; a prodrug; an antibody; an agent that alters KChIP1 gene or nucleic acid expression; an agent that alters activity of a polypeptide encoded by a KChIP1 gene or nucleic acid; an agent that alters posttranscriptional processing of a polypeptide encoded by a KChIP1 gene or nucleic acid; an agent that alters interaction of a KChIP1 polypeptide with a KChIP1 binding agent or receptor; an agent that alters transcription of splicing variants encoded by a KChIP1 gene or nucleic acid; and ribozymes. The invention also relates to pharmaceutical compositions comprising at least one Type II diabetes therapeutic agent as described herein.

[0019] The invention also pertains to a method of treating a disease or condition associated with a KChIP1 polypeptide (e.g., Type II diabetes) in an individual, comprising administering a Type II diabetes therapeutic agent to the individual, in a therapeutically effective amount. In certain embodiments, the Type II diabetes therapeutic agent is a KChIP1 agonist; in other embodiments, the Type II diabetes therapeutic agent is a KChIP1 antagonist. The invention additionally pertains to use of a Type II diabetes therapeutic agent as described herein, for the manufacture of a medicament for use in the treatment of Type II diabetes, such as by the methods described herein.

[0020] A transgenic animal comprising a nucleic acid selected from the group consisting of: an exogenous KChIP1 gene or nucleic acid and a nucleic acid encoding a KChIP1 polypeptide, is further contemplated by the invention.

[0021] In yet another embodiment, the invention relates to a method for assaying a sample for the presence of a KChIP1 nucleic acid, comprising contacting the sample with a nucleic acid comprising a contiguous nucleotide sequence which is at least partially complementary to a part of the sequence of said KChIP1 nucleic acid under conditions appropriate for hybridization, and assessing whether hybridization has occurred between a KChIP1 nucleic acid and said nucleic acid comprising a contiguous nucleotide sequence which is at least partially complementary to a part of the sequence of said KChIP1 nucleic acid; wherein if hybridization has occurred, a KChIP1 nucleic acid is present in sample. In certain embodiments, the contiguous nucleotide sequence is completely complementary to a part of the sequence of said KChIP1 nucleic acid. If desired, amplification of at least part of said KChIP1 nucleic acid can be performed.

[0022] In certain other embodiments, the contiguous nucleotide sequence is 100 or fewer nucleotides in length and is either at least 80% identical to a contiguous sequence of nucleotides of one or more of SEQ ID NOs: 1 and 114-258; at least 80% identical to the complement of a contiguous sequence of nucleotides of one or more of SEQ ID NOs: 1 and 114-258; or capable of selectively hybridizing to said KChIP1 nucleic acid.

[0023] In other embodiments, the invention relates to a reagent for assaying a sample for the presence of a KChIP1 gene or nucleic acid, the reagent comprising a contiguous nucleotide sequence which is at least partially complementary to a part of the nucleic acid sequence of said KChIP1 gene or nucleic acid; or comprising a contiguous nucleotide sequence which is completely complementary to a part of the nucleic acid sequence of said KChIP1 gene or nucleic acid. Also contemplated by the invention is a reagent kit, e.g., for assaying a sample for the presence of a KChIP1 nucleic acid, comprising (e.g., in separate containers) one or more labeled nucleic acids comprising a contiguous nucleotide sequence which is at least partially complementary to a part of the nucleic acid sequence of the KChIP1 nucleic acid, and reagents for detection of said label. In certain embodiments, the labeled nucleic acid comprises a contiguous nucleotide sequence that is completely complementary to a part of the nucleotide sequence of said KChIP1 gene or nucleic acid. In other embodiments, the labeled nucleic acid can comprise a contiguous nucleotide sequence which is at least partially complementary to a part of the nucleotide sequence of said KChIP1 gene or nucleic acid, and which is capable of acting as a primer for said KChIP1 nucleic acid when maintained under conditions for primer extension.

[0024] The invention also provides for the use of a nucleic acid which is 100 or fewer nucleotides in length and which is either: a) at least 80% identical to a contiguous sequence of nucleotides of one or more of SEQ ID NOs: 1 and 114-258; b) at least 80% identical to the complement of a contiguous sequence of nucleotides of one or more of SEQ ID NOs: 1 and 114-258; or c) capable of selectively hybridizing to said KChIP1 nucleic acid, for assaying a sample for the presence of a KChIP1 nucleic acid.

[0025] In yet another embodiment, the use of a first nucleic acid which is 100 or fewer nucleotides in length and which is either: a) at least 80% identical to a contiguous sequence of nucleotides of one or more of SEQ ID NOs: 1 and 114-258; b) at least 80% identical to the complement of a contiguous sequence of nucleotides of one or more of SEQ ID NOs: 1 and 114-258; or c) capable of selectively hybridizing to said KChIP1 nucleic acid; for assaying a sample for the presence of a KChIP1 gene or nucleic acid that has at least one nucleotide difference from the first nucleic acid (e.g., a SNP as set forth in Table 10), such as for diagnosing a susceptibility to a disease or condition associated with a KChIP1.

[0026] The invention also relates to a method of diagnosing Type II diabetes or a susceptibility to Type II diabetes in an individual, comprising determining the presence or absence in the individual of certain “haplotypes” (combinations of genetic markers). In one aspect of the invention of diagnosising a susceptibility of the disease, methods are described comprising screening for one of the at-risk haplotypes in the KChIP1 gene that is more frequently present in an individual susceptible to Type II diabetes, compared to the frequency of its presence in the general population, wherein the presence of an at-risk haplotype is indicative of a susceptibility to Type II diabetes. An “at-risk haplotype” is intended to embrace one or a combination of haplotypes described herein over the KChIP1 gene that show high correlation to Type II diabetes. In one embodiment, the at-risk haplotype is characterized by the presence of at least one single nucleotide polymorphisms as described in Table 13. In one embodiment, a haplotype associated with Type II diabetes or a susceptibility to Type II diabetes comprises one or more haplotypes identified in Table 2 (haplotypes identified as A1, A2, A3, A4, A5, A6, B1, B2, B3, B4 and B5), Table 4 (haplotypes identified as D1 and D2), Table 5 (haplotypes identified as D2, D3, D4, D5 and D6) Table 14 (haplotypes identified as Hap S7 (formerly E) and Hap S7′ formerly Hap. E′), Table 16 (haplotypes F1, F2 G1 and G2), Table 17 and Table 18 (haplotye S3) or S7. In certain embodiments, a haplotype associated with Type II diabetes or a susceptibility to Type II diabetes comprises markers DG5S879, DG5S881, D5S2075, DG5S883 and DG5S38 at the 5q35 locus; or DG5S1058 and DG5S37 at the 5q35 locus; or DG5S1058, DG5S37 and DG5S101 at the 5q35 locus; or DG5S881, DG5S1058, D5S2075, DG5S883 and DG5S38 at the 5q35 locus; or DG5S879, DG5S1058 and DG5S37; or DG5S881, D5S2075, DG5S883 and DG5S38 at the 5q35 locus; DG5S953, DG5S955, DG5S13 and DG5S959 at the 5q35 locus; or DG5S888 and DG5S953 at the 5q35 locus; or DG5S953, DG5S955 and DG5S124 at the 5q35 locus; or DG5S888, DG5S44 and DG5S953 at the 5q35 locus; DG5S953, DG5S955, DG5S13, DG5S123, and DG5S959 or at SG05S96, DG00AAJIB and DG00AAJHF at the 5q35 locus. The presence of the haplotype is diagnostic of Type II diabetes or of a susceptibility to Type II diabetes. Also described herein is a haplotype associated with Type II diabetes or a susceptibility to Type II diabetes comprising markers DG5S13, KCP_{—}1152, and D5S625 at the 5q35 locus; the presence of the haplotype is diagnostic of Type II diabetes or of a susceptibility to Type II diabetes. In one particular embodiment, the presence of the −4, 1, 0 haplotype at DG5S13, KCP_{—}1152, and D5S625 is diagnostic of Type II diabetes or of a susceptibility to Type II diabetes. In another embodiment, a haplotype associated with Type II diabetes or a susceptibility to Type II diabetes in an individual, comprises markers DG5S124, KCP_{—}1152, KCP_{—}2649, KPC_{—}4976 and KPC-16152 at the 5q35 locus. In one particular embodiment, the presence of the 0, 1, 1, 3 and 0 haplotype at DG5S 124, KCP_{—}1152, KCP_{—}2649, KPC_{—}4976 and KPC-16152 is diagnostic of Type II diabetes or of a susceptibility to Type II diabetes. In another embodiment, a haplotype associated with Type II diabetes or a susceptibility to Type II diabetes in an individual, comprises markers KCP_{—}173982, KCP_{—}15400, and KCP_{—}18069. In one particular embodiment, the presence of the 0, 1, 1 haplotype at KCP_{—}173982, KCP_{—}15400, and KCP_{—}18069 is diagnostic of Type II diabetes or of a susceptibility to Type II diabetes.

[0027] In additional embodiments, a haplotype associated with Type II diabetes or a susceptibility to Type II diabetes comprises markers DG5S124, KCP_{—}1152, KCP_{—}2649, KCP_{—}4976, and KCP_{—}16152 at the 5q35 locus, as well as one of the following 3 markers: KCP_{—}197678, KCP_{—}197775, and KCP_{—}202795 at the 5q35 locus; the presence of the haplotype is diagnostic of Type II diabetes or of a susceptibility to Type II diabetes. In particular embodiments, the presence of the 0, 3, 1, 1, 3, 0 haplotype at DG5S124, KCP_{—}197678, KCP_{—}1152, KCP_{—}2649, KCP_{—}4976, and KCP_{—}16152; the presence of the 0, 3, 1, 1, 3, 0 haplotype at DG5S 124, KCP_{—}197775, KCP_{—}1152, KCP_{—}2649, KCP_{—}4976, and KCP_{—}16152; the presence of the 0, 1, 1, 1, 3, 0 haplotype at DG5S124, KCP_{—}202795, KCP_{—}1152, KCP_{—}2649, KCP_{—}4976, and KCP_{—}16152 or the presence of 2,1,1 haplotype at SG05S96, DG00AAJIB and DG00AAJHF; is diagnostic of Type II diabetes or of a susceptibility to Type II diabetes.

[0028] In additional embodiments, a haplotype associated with Type II diabetes or a susceptibility to Type II diabetes comprises markers rs1032856, KCP_RS888934, KCP_{—}93545, KCP_{—}102882, 169234, KCP_{—}186048 and KCP_{—}16152, as well as markers rs1032856, KCP_RS888934, KCP_{—}93545, KCP_{—}102882, 169234, KCP_{—}186048, KCP_{—}197775 and KCP_{—}16152 at the 5q35 locus; the presence of the haplotype is diagnostic of Type II diabetes or of a susceptibility to Type II diabetes. In particular embodiments, the presence of the G, G, T, C, G, G, A haplotype at rs1032856, KCP_RS888934, KCP_{—}93545, KCP_{—}102882, 169234, KCP_{—}186048 and KCP_{—}16152, or the presence of the G, G, T, C, G, G, C, A haplotype at rs1032856, KCP_RS888934, KCP_{—}93545, KCP_{—}102882, 169234, KCP_{—}186048, KCP_{—}197775 and KCP_{—}16152 is diagnostic of Type II diabetes or of a susceptibility to Type II diabetes.

[0029] In one particular embodiment, the presence of 2,1,1 haplotype at SG05S96, DG00AAJIB and DG00AAJHF is diagnostic of Type II diabetes or of a susceptibility to Type II diabetes. In another embodiment, a haplotype associated with Type II diabetes or a susceptibility to Type II diabetes in an individual, comprises SG05S96, DG00AAJIB and DG00AAJHF.

[0030] In another embodiment, a haplotype associated with Type II diabetes or a susceptibility to Type II diabetes in an individual, comprises the presence of G G T C G G A at SG05S96, SG05S93, SG05S64, DG00AAJIB, SG05S156, SG05S213, and SG05S948. In addition embodiments, the additional resequencing exercises can identify significant SNPs, for example, Table 26. These are of the same surrogate class, i.e., they are in perfect linkage disequalibrium with each other.

[0031] The presence or absence of the haplotype can be determined by various methods, including, for example, using enzymatic amplification of nucleic acid from the individual, electrophoretic analysis, restriction fragment length polymorphism analysis and/or sequence analysis.

[0032] Also described herein is a method of diagnosing Type II diabetes in an individual, comprising determining the presence or absence in the individual of a haplotype comprising one or more markers and/or single nucleotide polymorphisms as shown in Table 10, Table 2, Table 4, Table 5, Tables 13, Table 14, Table 16, Table 17, Table 18, Tables 20-24, and/or Table 26 in the locus on chromosome 5q35, wherein the presence of the haplotype is diagnostic of Type II diabetes. Also contemplated is a method of diagnosing a susceptibility to Type II diabetes in an individual, comprising determining the presence or absence in the individual of a haplotype comprising one or more markers and/or single nucleotide polymorphisms as shown in Table 10, Table 13, Table 14 and/or Table 26 in the locus on chromosome 5q35, wherein the presence of the haplotype is diagnostic of a susceptibility to Type II diabetes.

[0033] A method for the diagnosis and identification of a susceptibility to Type II diabetes in an individual is also described, comprising: screening for an at-risk haplotype in the KChIP1 nucleic acid that is more frequently present in an individual susceptible to Type II diabetes compared to an individual who is not susceptible to Type II diabetes, wherein the at-risk haplotype increases the risk significantly. In certain embodiments, the significant increase is at least about 20% or the significant increase is identified as an odds ratio of at least about 1.2.

[0034] In another embodiment, the invention features a method of diagnosing a predisposition or susceptibility to Type II diabetes in a subject, comprising detecting the presence or absence of a genetic marker associated with the KChIP1 gene, the marker having a p-value of 1×1-5 or less, wherein the presence of the marker associated with the KChIP1 gene is indicative of a predisposition or susceptibility to Type II diabetes.

[0035] In another embodiment, the invention features a method of diagnosing a predisposition or susceptibility to an Type II diabetes associated condition in a subject, comprising detecting the presence or absence of a genetic marker associated with the KChIP1 gene, the marker having a p-value of 1×10⁻⁵ or less, wherein the presence of the marker associated with the KChIP1 gene is indicative of a predisposition or susceptibility to an Type II diabetes associated condition.

[0036] In other embodiments, the at-risk haplotype has a relative risk of at least 1.5, at least 2.5 or at least 3.0. In other embodiments, the at-risk haplotype associated with the KChIP1 gene has a p-value of 1×10⁻⁵ or less, 1×10⁻⁶ or less, 1×10⁻⁷ or less or 1×10⁻⁸ or less.

[0037] A major application of the current invention involves prediction of those at higher risk of developing a Type II diabetes. Diagnostic tests that define genetic factors contributing to Type II diabetes could be used together with or independent of the known clinical risk factors to define an individual's risk relative to the general population. Better means for identifying those individuals at risk for Type II diabetes should lead to better prophylactic and treatment regimens, including more aggressive management of the current clinical risk factors.

[0038] Another application of the current invention is the specific identification of a rate-limiting pathway involved in Type II diabetes. A disease gene with genetic variation that is significantly more common in diabetic patients as compared to controls represents a specifically validated causative step in the pathogenesis of Type II diabetes. That is, the uncertainty about whether a gene is causative or simply reactive to the disease process is eliminated. The protein encoded by the disease gene defines a rate-limiting molecular pathway involved in the biological process of Type II diabetes predisposition. The proteins encoded by such Type II genes or its interacting proteins in its molecular pathway can represent drug targets that may be selectively modulated by small molecule, protein, antibody, or nucleic acid therapies. Such specific information is greatly needed since the population affected with Type II diabetes is growing.

[0039] A third application of the current invention is its use to predict an individual's response to a particular drug, even drugs that do not act on KChIP1 or its pathway. It is a well-known phenomenon that in general, patients do not respond equally to the same drug. Much of the differences in drug response to a given drug is thought to be based on genetic and protein differences among individuals in certain genes and their corresponding pathways. The present invention defines the association of KChIP1 with Type II diabetes. Some current or future therapeutic agents may be able to affect this gene directly or indirectly and therefore, be effective in those patients whose Type II diabetes risk is in part determined by the KChIP1 genetic variation. On the other hand, those same drugs may be less effective or ineffective in those patients who do not have at risk variation in the KChIP1 gene. Therefore, KChIP1 variation or haplotypes can be used as a pharmacogenomic diagnostic to predict drug response and guide choice of therapeutic agent in a given individual.

### BRIEF DESCRIPTION OF THE DRAWINGS

[0040] The patent or application file contains at least one drawing executed in color. Copies of this patent or patent application publication with color drawings will be provided by the Office upon request and payment of the necessary fee.

[0041] The foregoing and other objects, features and advantages of the invention will be apparent from the following more particular description of preferred embodiments of the invention, as illustrated in the accompanying drawings.

[0042] FIG. 1A through 1R6 show the KChIP1 genomic DNA (SEQ ID NO: 1). This sequence is taken from NCBI Build 33. The numbering in FIG. 1, as well as the “start” and “end” numbers in all Tables refer to the location in Chromosome 5 in NCBI Build 33 or Build 34. The numbering in FIG. 1 refers to the last base in the line immediately preceding the number; the numbers are in decreasing order because of the “reverse orientation” of the gene.

[0043] FIG. 2 shows the amino acid sequence of KChIP1 as published by An et al. Nature, 403(6768): 553-6 (2000) (SEQ ID NO: 2).

[0044] FIG. 3 shows the nucleic acid sequence (SEQ ID NO: 3) encoding the amino acid sequence of KChIP1 as published by An et al, Nature, 403(6768): 553-6 (2000) (SEQ ID NO: 2).

[0045] FIG. 4 is a series of graphs showing the results of a genome-wide scan using 906 microsatellite markers. Results are shown for three phenotypes: all Type II diabetics (solid lines), obese Type II diabetics (dotted lines) and non-obese Type II diabetics (dashed lines). The multipoint allele-sharing LOD-score is on the vertical axis, and the centimorgan distance from the P-terminus of the chromosome is on the horizontal axis.

[0046] FIG. 5 graphically depicts the multipoint allele-sharing LOD-score of the locus on chromosome 5 after 38 microsatellite markers have been added to the framework set in a 40-cM interval, from 160 cM to 200 cM. Results are shown for the same three phenotypes as in FIG. 4; all Type II diabetics (solid line), non-obese Type II diabetics (dashed line) and obese Type II diabetics (dotted line) the results of a genome-wide scan using 906 microsatellite markers.

[0047] FIG. 6 graphically depicts the single-marker and haplotype association within the 1-LOD-drop for 590 non-obese diabetics vs 477 unrelated population controls. The location of the markers and haplotypes is on the horizontal axis and the corresponding two-sided P-value on the vertical axis. All haplotypes with a P-value less than 0.01 are shown. The horizontal bars indicate the span of the corresponding haplotypes and the marker density is shown at the bottom of the figure. All locations refer to NCBI Build 33 and the 1-LOD-drop spans from 167.64 to 171.28 Mb.

[0048] FIG. 7 schematically shows the location of genes and markers in region B. The microsatellites used in the locus-wide association study are shown as filled circles at the top. The filled boxes indicate the locations of exons, or clusters of exons, for KCHIP1. The shaded boxes indicated the location and size of the neighboring genes, LCP2, KCNMB1, GABRP and RANBP17, and the grey horizontal lines indicate the span of the five most significant microsatellite haplotypes in the region.

[0049] FIG. 8A is a plot of the single-marker and haplotype association within the 1-LOD-drop for the genotyped 475 unrelated non-obese Icelandic T2D patients and 477 unrelated population controls. The location of the markers/haplotypes is on the horizontal axis and the corresponding two-sided p-value on the vertical axis. All haplotypes with a p-value less than 0.01 are shown. The horizontal bars indicate the span of the corresponding haplotypes and the marker density is shown at the bottom of the figure. All locations refer to NCBI Build 34. The 3.64 Mb 1-LOD-drop spans between the boundary markers of DG5S5 and D5S429 i.e. 167.68-171.32 Mb.

[0050] FIG. 8B schematically shows the location of genes and markers in region B (Build 34). The microsatellites used in locus-wide association study are shown as filled blue circles at the top. The filled red boxes indicate the locations of exons, or clusters of exons, for KChIP1. The shaded green boxes indicated the location and size of the neighboring genes, LCP2, KCNMB1, GABRP and RANBP17, and the grey horizontal lines indicate the span of the haplotypes observed (G1(B1), G2(B2), D1, D2, S3) in the region.

[0051] FIG. 8C graphically depicts the KChIP1 region of interest with respect to linkage disequilibrium (LD) of the SNPs identified across the gene (allelic frequency>5%; n=456). The markers are plotted equidistantly rather than according to their physical positions; the relative locations of the KChIP1 exons, haplotypes D1, D2 and S3 are indicated.

[0052] FIG. 9A is a multi-tissue Northern blot showing that KChIP1 is expressed in pancreatic β-cells, the blot was hybridized with a human KChIP1 specific probe spanning exons 1 and 2.

[0053] FIG. 9B is a Western blot produced with 50 μg of pancreatic tissue lysate or INS-1 cell lysate applied to 4-20% gradient SDS-PAGE and probed with an anti-KChIP1 antiserum (0.5 μg/ml). An anti-GAPDH antibody (1:50 000) was used as control for equal loading. A band of the corresponding size was in brain lysate but not in kidney or pancreas (brain and kidney not shown).

[0054] FIG. 10A is a western blot of INS1-shLuc and INS1-shKChIP1#432 cell lysates. Increasing amounts of protein 5, 10 or 25 μg were subjected to western blotting and probed with rabbit anti-KChIP1 (0.5 μg/ml) and mouse anti-GAPDH (1:50000), respectively. The intensity of the bands was quantified with Kodak 1D software and the amount in INS-1 shLuc cells (10 μg) was set to 100%, resulting in a calculated 82% knock down of endogenous KChIP1 expression FIG. 10B graphically depicts the results from an experiment of INS-1 cells either expressing siRNAs for KChIP1 (#sh432) or luciferase when incubated in KRB containing 0.5 mM glucose or induced with 11.2 mM for 2 h. Secreted insulin levels were quantified using an ELISA. The results are expressed as the mean±SEM of the insulin levels measured in 12 independent experiments. A two-sided student's t-test assuming unequal variance was performed. P-values were 1.84×10⁻⁷ (for basal) and p=1.89×10⁻⁶ (for 11.2 mM glucose).

[0055] FIG. 11A is a western blot analysis of whole cell lysates from INS-1 cells transduced with an empty retrovirus (control) or a retrovirus expressing the human KChIP1 cDNA. Blots were probed with anti-KChIP1 antiserum (0.5 ug/ml) and subsequently with GAPDH mouse monoclonal antibody (1:50,000).

[0056] FIG. 11B graphically depicts the results of INS-1 cells transduced with the control retrovirus (control) or the KChIP1 expressing retroviruses (KChIP1) when incubated in KRB containing 0.5 mM glucose or 11.2 mM glucose for 2 h. The results are expressed as the mean±SEM of the insulin levels measured in 12 independent experiments. The reduction in insulin release between control and KChIP1 cells was significant (two-sided p-values=5.2×10−5).

[0057] FIG. 12 graphically depicts the KChIP1 region of interest with respect to linkage disequilibrium (LD) of the 66 SNPs identified across the gene.

[0058] FIG. 13A-13E4 show Table 6 that comprises the DNA sequence of the microsatellites employed for the Co5 locus wide association (including Build 33 locations) and Table 7 that comprises the DNA Sequence of microsatellites employed for the association studies across KChIP1 (including Build 33 locations) and Table 10 that comprises DNA sequence of the SNPs identified across KChIP1.

[0059] FIG. 14A-14E7 show the SNP amplimer sequences for the study.

### DETAILED DESCRIPTION OF THE INVENTION

[0060] Extensive genealogical information for a population with population-based lists of patients with Type II diabetes have been combined with powerful gene sharing methods to map a locus on chromosome 5q35. Diabetics and their relatives were genotyped with a genome-wide marker set including 906 microsatellite markers, with an average marker density of 4 cM. Due to the role obesity plays in the development of diabetes, the material was fractionated according to body mass index (BMI). Presented herein are results of a genome wide search of genes that cause Type II diabetes in Iceland.

Loci Associated with Diabetes

[0061] Type 2 diabetes is characterized by hyperglycemia which can occur through one or more physiologic mechanisms including impaired insulin secretion, insulin resistance in peripheral tissues, and increased glucose output by the liver. Most patients suffer the serious complications of chronic hyperglycemia including nephropathy, neuropathy, retinopathy and the accelerated development of cardiovascular disease.

[0062] There is strong evidence for a genetic component to the risk of Type II diabetes, including prevalence differences among various racial groups. Mutations in six genes have been discovered that cause MODY, or maturity onset diabetes of the young. MODY1-MODY6 are due to mutations in HNF4a, glucokinase, HNF1a, IPF1, HNF1b and NEUROD1 (MODY1: Yamagata K, et al., Nature 384:458-460 (1996); MODY2: Froguel P, F et al., Nature 356: 162-164 (1992); MODY3: Yamagata, K., et al., Nature 384: 455-458 (1996); MODY4: Yoshioka M., et al., Diabetes, May; 46(5):887-94 (1997) MODY5: Horikawa, Y., et al., Nat. Genet. 17: 384-385 (1997) MODY6: Kristinsson S. Y., et al., Diabetologia, November: 44(11):2098-103 (2001)).

[0063] One gene has been identified as a disease gene that contributes to the late-onset form of diabetes, the calpain 10 gene (CAPN10). CAPN10, was identified though a genome-wide screen of Mexican American sibpairs with diabetes (Horikawa, Y., et al., Nat. Genet. 26(2) 163-175 (2000)). The risk allele has been shown to be associated with impaired regulation of glucose-induced secretion and decreased rate of insulin-stimulated glucose disposal (Lynn, S., et al., Diabetes, 51(1): 247-250 (2002); Sreenan, S. K., et al., Diabetes 50(9) 2013-2020 (2001) and Baier, L. J., et al., J. Clin. Invest. 106(7) R69-73 (2000)).

[0064] Many genome-wide screens in a variety of populations have been performed that have resulted in major loci for Diabetes. Loci are reported on chromosome 2q37 (Hanis, C. L., et al., Nat. Genet., 13(2):161-166 (1996)), chromosome 15q21 (Cox, et al., Nat. Genet. 21(2):213-215 (1999)), chromosome 10q26 (Duggirala, R., et al., Am. J. Hum. Genet., 68(5):1149-1164 (2001)), chromosome 3p (Ehm, M. G., et al., Am. J. Hum. Genet., 66(6):1871-1881 (2000)) in Mexican Americans, and chromosomes 1q21-23 and 11 q23-q25 (Hanson R. L. et al., Am J. Hum Genet., 63(4):1130-1138 (1998)) in PIMA Indians. In the Caucasian population, linkages have been observed to chromosome 12q24 in Finns (Mahtani, et al., Nat. Genet., 14(1):90-4 (1994)), chromosome 1q21-q23 in Americans in Utah (Elbein, S. C., et al., Diabetes, 48(5): 1175-1182 (1999)), chromosome 3q27-pter in French families (Vionnet, N., et al., Am. J. Hum. Genet. 67(6): 1470-80 (2000) and chromosome 18p11 in Scandinavians (Parker, A., et al., Diabetes, 50(3) 675-680 (2001)). A recent study reported a major locus in indigenous Australians on chromosome 2q24.3 (Busfield, F., et al., Am. J. Hum. Genet., 70(2): 349-357 (2002)). Many other studies have resulted in suggestive loci or have replicated these loci.

[0065] Association studies have been reported for Type II diabetes. Most of these studies show modest association to the disease in a group of people but do not account for the disease. Altshuler et al. reviewed the association work that has been done and concluded that association to only one of 16 genes revealed held up to scrutiny. Altshuler et al. confirmed that the Pro12Ala polymorphism in PPARg is associated with Type II diabetes. Until now, there have been no linkage studies in Type II diabetes linking the disease to chromosome 5q35.

Assessment for At-Risk Haplotypes

[0066] Populations of individuals exhibiting genetic diversity do not have identical genomes; in other words, there are many polymorphic sites in a population. In some instances, reference is made to different alleles at a polymorphic site without choosing a reference allele. Alternatively, a reference sequence can be referred to for a particular polymorphic site. The reference allele is sometimes referred to as the “wild-type” allele and it usually is chosen as either the first sequenced allele or as the allele from a “non-affected” individual (e.g., an individual that does not display a disease or abnormal phenotype). Alleles that differ from the reference are referred to as “variant” alleles.

[0067] A “haplotype,” as described herein, refers to a combination of genetic markers (“alleles”), such as those set forth in Table 2, Table 4, Table 5, Table 14, and Tables 16-18. In a certain embodiment, the haplotype can comprise one or more alleles, two or more alleles, three or more alleles, four or more alleles, or five or more alleles. The genetic markers are particular “alleles” at “polymorphic sites” associated with KChIP1. A nucleotide position at which more than one sequence is possible in a population (either a natural population or a synthetic population, e.g., a library of synthetic molecules) is referred to herein as a “polymorphic site”. Where a polymorphic site is a single nucleotide in length, the site is referred to as a single nucleotide polymorphism (“SNP”). For example, if at a particular chromosomal location, one member of a population has an adenine and another member of the population has a thymine at the same position, then this position is a polymorphic site, and, more specifically, the polymorphic site is a SNP. Polymorphic sites can allow for differences in sequences based on substitutions, insertions or deletions. Each version of the sequence with respect to the polymorphic site is referred to herein as an “allele” of the polymorphic site. Thus, in the previous example, the SNP allows for both an adenine allele and a thymine allele.

[0068] Typically, a reference sequence is referred to for a particular sequence. Alleles that differ from the reference are referred to as “variant” alleles. For example, the reference KChIP1 sequence is described herein by SEQ ID NO: 1. The term, “variant KChIP1”, as used herein, refers to a sequence that differs from SEQ ID NO: 1 but is otherwise substantially similar. The genetic markers that make up the haplotypes described herein are KChIP1 variants. Additional variants can include changes that affect a polypeptide, e.g., the KChIP1 polypeptide. These sequence differences, when compared to a reference nucleotide sequence, can include the insertion or deletion of a single nucleotide, or of more than one nucleotide, resulting in a frame shift; the change of at least one nucleotide, resulting in a change in the encoded amino acid; the change of at least one nucleotide, resulting in the generation of a premature stop codon; the deletion of several nucleotides, resulting in a deletion of one or more amino acids encoded by the nucleotides; the insertion of one or several nucleotides, such as by unequal recombination or gene conversion, resulting in an interruption of the coding sequence of a reading frame; duplication of all or a part of a sequence; transposition; or a rearrangement of a nucleotide sequence, as described in detail above. Such sequence changes alter the polypeptide encoded by a KChIP1 nucleic acid. For example, if the change in the nucleic acid sequence causes a frame shift, the frame shift can result in a change in the encoded amino acids, and/or can result in the generation of a premature stop codon, causing generation of a truncated polypeptide. Alternatively, a polymorphism associated with Type II diabetes or a susceptibility to Type II diabetes can be a synonymous change in one or more nucleotides (i.e., a change that does not result in a change in the amino acid sequence). Such a polymorphism can, for example, alter splice sites, affect the stability or transport of mRNA, or otherwise affect the transcription or translation of the polypeptide. The polypeptide encoded by the reference nucleotide sequence is the “reference” polypeptide with a particular reference amino acid sequence, and polypeptides encoded by variant alleles are referred to as “variant” polypeptides with variant amino acid sequences.

[0069] The haplotypes described herein are a combination of various genetic markers, e.g., SNPs and microsatellites. The haplotypes can comprise a combination of various genetic markers, therefore, detecting haplotypes can be accomplished by methods known in the art for detecting sequences at polymorphic sites. For example, standard techniques for genotyping for the presence of SNPs and/or microsatellite markers can be used, such as fluorescent based techniques (Chen, et al., Genome Res. 9, 492 (1999)), PCR, LCR, Nested PCR and other techniques for nucleic acid amplification. These markers and SNPs can be identified in at-risk haplotypes. Certain methods of identifying relevant markers and SNPs include the use of linkage disequilibium (LD) and/or LOD scores.

Linkage Disequilibrium

[0070] Linkage Disequilibrium (LD) refers to a non-random assortment of two genetic elements. For example, if a particular genetic element (e.g., “alleles” at a polymorphic site) occurs in a population at a frequency of 0.25 and another occurs at a frequency of 0.25, then the predicted occurrance of a person's having both elements is 0.125, assuming a random distribution of the elements. However, if it is discovered that the two elements occur together at a frequency higher than 0.125, then the elements are said to be in linkage disequilibrium since they tend to be inherited together at a higher rate than what their independent allele frequencies would predict. Roughly speaking, LD is generally correlated with the frequency of recombination events between the two elements. Allele frequencies can be determined in a population by genotyping individuals in a population and determining the occurence of each allele in the population. For populations of diploids, e.g., human populations, individuals will typically have two alleles for each genetic element (e.g., a marker or gene).

[0071] Many different measures have been proposed for assessing the strength of linkage disequilibrium (LD). Most capture the strength of association between pairs of biallelic sites. Two important pairwise measures of LD are r² (sometimes denoted Δ²) and |\acute{D}|. Both measures range from 0 (no disequilibrium) to 1 (‘complete’ disequilibrium), but their interpretation is slightly different. |\acute{D}| is defined in such a way that it is equal to 1 if just two or three of the possible haplotypes are present, and it is <1 if all four possible haplotypes are present. So, a value of |\acute{D}| that is <1 indicates that historical recombination has occurred between two sites (recurrent mutation can also cause |\acute{D}| to be <1, but for single nucleotide polymorphisms (SNPs) this is usually regarded as being less likely than recombination). The measure r² represents the statistical correlation between two sites, and takes the value of 1 if only two haplotypes are present. It is arguably the most relevant measure for association mapping, because there is a simple inverse relationship between r² and the sample size required to detect association between susceptibility loci and SNPs. These measures are defined for pairs of sites, but for some applications a determination of how strong LD is across an entire region that contains many polymorphic sites might be desirable (e.g., testing whether the strength of LD differs significantly among loci or across populations, or whether there is more or less LD in a region than predicted under a particular model). Measuring LD across a region is not straightforward, but one approach is to use the measure r, which was developed in population genetics. Roughly speaking, r measures how much recombination would be required under a particular population model to generate the LD that is seen in the data. This type of method can potentially also provide a statistically rigorous approach to the problem of determining whether LD data provide evidence for the presence of recombination hotspots. For the methods described herein, a significant r² value can be 0.3, 0.4, 0.5, 0.6, 0.7, 0.8, 0.9 or 1.0.

Haplotypes and LOD Score Definition of a Susceptibility Locus

[0072] In certain embodiments, haplotype analysis involves defining a candidate susceptibility locus using LOD scores. The defined regions are then ultra-fine mapped with microsatellite markers with an average spacing between markers of less than 100 kb. All usable microsatellite markers that are found in public databases and mapped within that region can be used. In addition, microsatellite markers identified within the deCODE genetics sequence assembly of the human genome can be used. The frequencies of haplotypes in the patient and the control groups can be estimated using an expectation-maximization algorithm (Dempster A. et al., 1977. J. R. Stat. Soc. B, 39:1-389). An implementation of this algorithm that can handle missing genotypes and uncertainty with the phase can be used. Under the null hypothesis, the patients and the controls are assumed to have identical frequencies. Using a likelihood approach, an alternative hypothesis is tested, where a candidate at-risk-haplotype, which can include the markers described herein, is allowed to have a higher frequency in patients than controls, while the ratios of the frequencies of other haplotypes are assumed to be the same in both groups. Likelihoods are maximized separately under both hypotheses and a corresponding 1-df likelihood ratio statistic is used to evaluate the statistic significance.

[0073] To look for at-risk-haplotypes in the 1-lod drop, for example, association of all possible combinations of genotyped markers is studied, provided those markers span a practical region. The combined patient and control groups can be randomly divided into two sets, equal in size to the original group of patients and controls. The haplotype analysis is then repeated and the most significant p-value registered is determined. This randomization scheme can be repeated, for example, over 100 times to construct an empirical distribution of p-values. In a preferred embodiment, a p-value of <0.05 is indicative of an at-risk haplotype.

[0074] A detailed discussion of haplotype analysis follows.

Haplotype Analysis

[0075] One general approach to haplotype analysis involves using likelihood-based inference applied to NEsted MOdels. The method is implemented in our program NEMO, which allows for many polymorphic markers, SNPs and microsatellites. The method and software are specifically designed for case-control studies where the purpose is to identify haplotype groups that confer different risks. It is also a tool for studying LD structures.

[0076] When investigating haplotypes constructed from many markers, apart from looking at each haplotype individually, meaningful summaries often require putting haplotypes into groups. A particular partition of the haplotype space is a model that assumes haplotypes within a group have the same risk, while haplotypes in different groups can have different risks. Two models/partitions are nested when one, the alternative model, is a finer partition compared to the other, the null model, i.e, the alternative model allows some haplotypes assumed to have the same risk in the null model to have different risks. The models are nested in the classical sense that the null model is a special case of the alternative model. Hence traditional generalized likelihood ratio tests can be used to test the null model against the alternative model. Note that, with a multiplicative model, if haplotypes hᵢ and hₑ are assumed to have the same risk, it corresponds to assuming that fᵢ/pᵢ=fⱼ/pⱼ where f and p denote haplotype frequencies in the affected population and the control population respectively.

[0077] One common way to handle uncertainty in phase and missing genotypes is a two-step method of first estimating haplotype counts and then treating the estimated counts as the exact counts, a method that can sometimes be problematic (e.g., see the information measure section below) and may require randomization to properly evaluate statistical significance. In NEMO, maximum likelihood estimates, likelihood ratios and p-values are calculated directly, with the aid of the EM algorithm, for the observed data treating it as a missing-data problem.

[0078] NEMO allows complete flexibility for partitions. For example, the first haplotype problem described in the Methods section on Statistical analysis considers testing whether h₁ has the same risk as the other haplotypes h₂, . . . , hₖ. Here the alternative grouping is [h₁], [h₂, . . . , hₖ] and the null grouping is [h₁, . . . , hₖ]. The second haplotype problem in the same section involves three haplotypes h₁=G0, h₂=GX and h₃=AX, and the focus is on comparing h₁ and h₂. The alternative grouping is [h₁], [h₂], [h₃] and the null grouping is [h₁, h₂], [h₃]. If composite alleles exist, one could collapse these alleles into one at the data processing stage, and performed the test as described. This is a perfectly valid approach, and indeed, whether we collapse or not makes no difference if there were no missing information regarding phase. But, with the actual data, if each of the alleles making up a composite correlates differently with the SNP alleles, this will provide some partial information on phase. Collapsing at the data processing stage will unnecessarily increase the amount of missing information. A nested-models/partition framework can be used in this scenario. Let h₂ be split into h₂ₐ, h_{2b}, . . . , h₂ₑ, and h₃ be split into h₃ₐ, h_{3b}, . . . , h₃ₑ. Then the alternative grouping is [h₁], [h₂ₐ, h_{2b}, . . . , h₂ₑ], [h₃ₐ, h_{3b}, . . . , h₃ₑ] and the null grouping is [h₁, h₂ₐ, h_{2b}, . . . , h₂ₑ], [h₃ₐ, h_{3b}, . . . , h₃ₑ]. The same method can be used to handle composite where collapsing at the data processing stage is not even an option since L_{C} represents multiple haplotypes constructed from multiple SNPs. Alternatively, a 3-way test with the alternative grouping of [h₁], [h₂ₐ, h_{2b}, . . . , h₂ₑ], [h₃ₐ, h_{3b}, . . . , h₃ₑ] versus the null grouping of [h₁, h₂ₐ, h_{2b}, . . . , h₂ₑ, h₃ₐ, h_{3b}, . . . , h₃ₑ] could also be performed. Note that the generalized likelihood ratio test-statistic would have two degrees of freedom instead of one.

Measuring Information

[0079] Even though likelihood ratio tests based on likelihoods computed directly for the observed data, which have captured the information loss due to uncertainty in phase and missing genotypes, can be relied on to give valid p-values, it would still be of interest to know how much information had been lost due to the information being incomplete. Interestingly, one can measure information loss by considering a two-step procedure to evaluating statistical significance that appears natural but happens to be systematically anti-conservative. Suppose we calculate the maximum likelihood estimates for the population haplotype frequencies calculated under the alternative hypothesis that there are differences between the affected population and control population, and use these frequency estimates as estimates of the observed frequencies of haplotype counts in the affected sample and in the control sample. Suppose we then perform a likelihood ratio test treating these estimated haplotype counts as though they are the actual counts. We could also perform a Fisher's exact test, but we would then need to round off these estimated counts since they are in general non-integers. This test will in general be anti-conservative because treating the estimated counts as if they were exact counts ignores the uncertainty with the counts, overestimates the effective sample size and underestimates the sampling variation. It means that the chi-square likelihood-ratio test statistic calculated this way, denoted by Λ*, will in general be bigger than A, the likelihood-ratio test-statistic calculated directly from the observed data as described in methods. But Λ* is useful because the ratio Λ/Λ* happens to be a good measure of information, or 1−(Λ/Λ*) is a measure of the fraction of information lost due to missing information. This information measure for haplotype analysis is described in Nicolae and Kong, Technical Report 537, Department of Statistics, University of Statistics, University of Chicago, Revised for Biometrics (2003) as a natural extension of information measures defined for linkage analysis, and is implemented in NEMO.

Statistical Analysis.

[0080] For single marker association to the disease, the Fisher exact test can be used to calculate two-sided p-values for each individual allele. All p-values are presented unadjusted for multiple comparisons unless specifically indicated. The presented frequencies (for microsatellites, SNPs and haplotypes) are allelic frequencies as opposed to carrier frequencies. To minimize any bias due the relatedness of the patients who were recruited as families for the linkage analysis, first and second-degree relatives can be eliminated from the patient list. Furthermore, the test can be repeated for association correcting for any remaining relatedness among the patients, by extending a variance adjustment procedure described in Risch, N. & Teng, J. (Genome Res., 8:1278-1288 (1998)). The relative power of family-based and case-control designs for linkage disequilibrium studies of complex human diseases I. DNA pooling (ibid) for sibships so that it can be applied to general familial relationships, and present both adjusted and unadjusted p-values for comparison. The differences are in general very small as expected. To assess the significance of single-marker association corrected for multiple testing we carried out a randomisation test using the same genotype data. Cohorts of patients and controls can be randomized and the association analysis redone multiple times (e.g., up to 500,000 times) and the p-value is the fraction of replications that produced a p-value for some marker allele that is lower than or equal to the p-value we observed using the original patient and control cohorts.

[0081] For both single-marker and haplotype analyses, relative risk (RR) and the population attributable risk (PAR) can be calculated assuming a multiplicative model (haplotype relative risk model), (Terwilliger, J. D. & Ott, J., Hum Hered, 42, 337-46 (1992) and Falk, C. T. & Rubinstein, P, Ann Hum Genet 51 (Pt 3), 227-33 (1987)), i.e., that the risks of the two alleles/haplotypes a person carries multiply. For example, if RR is the risk of A relative to a, then the risk of a person homozygote AA will be RR times that of a heterozygote Aa and RR² times that of a homozygote aa. The multiplicative model has a nice property that simplifies analysis and computations—haplotypes are independent, i.e., in Hardy-Weinberg equilibrium, within the affected population as well as within the control population. As a consequence, haplotype counts of the affecteds and controls each have multinomial distributions, but with different haplotype frequencies under the alternative hypothesis. Specifically, for two haplotypes hᵢ and hⱼ, risk(hᵢ)/risk(hⱼ)=(fᵢ/pᵢ)/(fⱼ/pⱼ), where f and p denote respectively frequencies in the affected population and in the control population. While there is some power loss if the true model is not multiplicative, the loss tends to be mild except for extreme cases. Most importantly, p-values are always valid since they are computed with respect to null hypothesis.

[0082] In general, haplotype frequencies are estimated by maximum likelihood and tests of differences between cases and controls are performed using a generalized likelihood ratio test (Rice, J. A. Mathematical Statistics and Data Analysis, 602 (International Thomson Publishing, (1995)). deCODE's haplotype analysis program called NEMO, which stands for NEsted MOdels, can be used to calculate all the haplotype results. To handle uncertainties with phase and missing genotypes, it is emphasized that we do not use a common two-step approach to association tests, where haplotype counts are first estimated, possibly with the use of the EM algorithm, Dempster, (A. P., Laird, N. M. & Rubin, D. B., Journal of the Royal Statistical Society B, 39, 1-38 (1971)) and then tests are performed treating the estimated counts as though they are true counts, a method that can sometimes be problematic and may require randomisation to properly evaluate statistical significance. Instead, with NEMO, maximum likelihood estimates, likelihood ratios and p-values are computed with the aid of the EM-algorithm directly for the observed data, and hence the loss of information due to uncertainty with phase and missing genotypes is automatically captured by the likelihood ratios. Even so, it is of interest to know how much information is retained, or lost, due to incomplete information. Described herein is such a measure that is natural under the likelihood framework. For a fixed set of markers, the simplest tests performed compare one selected haplotype against all the others. Call the selected haplotype h₁ and the others h₂, . . . , hₖ. Let p₁, . . . , pₖ denote the population frequencies of the haplotypes in the controls, and f₁, . . . , fₖ denote the population frequencies of the haplotypes in the affecteds. Under the null hypothesis, fᵢ=pᵢ for all i. The alternative model we use for the test assumes h₂, . . . , hₖ to have the same risk while h₁ is allowed to have a different risk. This implies that while p₁ can be different from f₁,fᵢ/(f₂+ . . . +fₖ)=pᵢ/(p₂+ . . . +pₖ)=βᵢ for i=2, . . . , k. Denoting f₁/p₁ by r, and noting that β₂+ . . . +βₖ=1, the test statistic based on generalized likelihood ratios is
Λ=2[l(\hat{r}, \hat{p}₁, \hat{β}₂, . . . , \hat{β}ₖ₋₁)−l(1,\tilde{p}₁, \tilde{β}₂, . . . , \tilde{β}ₖ₋₁)]
where l denotes logₑlikelihood and ~ and \hat{ } denote maximum likelihood estimates under the null hypothesis and alternative hypothesis respectively. A has asymptotically a chi-square distribution with 1-df, under the null hypothesis. Slightly more complicated null and alternative hypotheses can also be used. For example, let h₁ be G0, h₂ be GX and h₃ be AX. When comparing G0 against GX, i.e., this is the test which gives estimated RR of 1.46 and p-value=0.0002, the null assumes G0 and GX have the same risk but AX is allowed to have a different risk. The alternative hypothesis allows, for example, three haplotype groups to have different risks. This implies that, under the null hypothesis, there is a constraint that f₁/p₁=f₂/p₂, or w=[f₁/p₁]/[f₂/p₂]=1. The test statistic based on generalized likelihood ratios is
Λ=2[l(\hat{p}₁, \hat{f}₁, \hat{p}₂, ŵ)−l(\tilde{p}₁, \tilde{f}₁, \tilde{p}₂, 1)]
that again has asymptotically a chi-square distribution with 1-df under the null hypothesis. If there are composite haplotypes (for example, h₂ and h₃), that is handled in a natural manner under the nested models framework.
Linkage Disequilibrium Using NEMO

[0083] LD between pairs of SNPs can be calculated using the standard definition of D′ and R² (Lewontin, R., Genetics 49, 49-67 (1964) and Hill, W. G. & Robertson, A. Theor. Appl. Genet. 22, 226-231 (1968)). Using NEMO, frequencies of the two marker allele combinations are estimated by maximum likelihood and deviation from linkage equilibrium is evaluated by a likelihood ratio test. The definitions of D′ and R² are extended to include microsatellites by averaging over the values for all possible allele combination of the two markers weighted by the marginal allele probabilities. When plotting all marker combination to elucidate the LD structure in a particular region, we plot D′ in the upper left corner and the p-value in the lower right corner. In the LD plots the markers can be plotted equidistant rather than according to their physical location, if desired.

Statistical Methods for Linkage Analysis

[0084] Multipoint, affected-only allele-sharing methods can be used in the analyses to assess evidence for linkage. Results, both the LOD-score and the non-parametric linkage (NPL) score, can be obtained using the program Allegro (Gudbjartsson et al., Nat. Genet. 25:12-3, 2000). Our baseline linkage analysis uses the Spairs scoring function (Whittemore, A. S., Halpern, J. (1994), Biometrics 50:118-27; Kruglyak L, et al. (1996), Am J Hum Genet 58:1347-63), the exponential allele-sharing model (Kong, A. and Cox, N. J. (1997), Am J Hum Genet 61:1179-88) and a family weighting scheme that is halfway, on the log-scale, between weighting each affected pair equally and weighting each family equally. The information measure we use is part of the Allegro program output and the information value equals zero if the marker genotypes are completely uninformative and equals one if the genotypes determine the exact amount of allele sharing by decent among the affected relatives (Gretarsdottir et al., Am. J. Hom. Genet, 70:593-603, (2002)). The P-values were computed two different ways and the less significant result is reported here. The first P-value can be computed on the basis of large sample theory; the distribution of Zₗᵣ=√(2 [logₑ(10)LOD]) approximates a standard normal variable under the null hypothesis of no linkage (Kong, A. and Cox, N. J. (1997), Am J Hum Genet 61:1179-88). The second P-value can be calculated by comparing the observed LOD-score with its complete data sampling distribution under the null hypothesis (e.g., Gudbjartsson et al., Nat. Genet. 25:12-3, 2000). When the data consist of more than a few families, these two P-values tend to be very similar.

Haplotypes and “Haplotype Block” Definition of a Susceptibility Locus

[0085] In certain embodiments, haplotype analysis involves defining a candidate susceptibility locus based on “haplotype blocks.” It has been reported that portions of the human genome can be broken into series of discrete haplotype blocks containing a few common haplotypes; for these blocks, linkage disequilibrium data provided little evidence indicating recombination (see, e.g., Wall., J. D. and Pritchard, J. K., Nature Reviews Genetics 4: 587-597 (2003); Daly, M. et al., Nature Genet. 29:229-232 (2001); Gabriel, S. B. et al., Science 296:2225-2229 (2002); Patil, N. et al., Science 294:1719-1723 (2001); Dawson, E. et al., Nature 418:544-548 (2002); Phillips, M. S. et al., Nature Genet. 33:382-387 (2003)).

[0086] There are two main methods for defining these haplotype blocks: blocks can be defined as regions of DNA that have limited haplotype diversity (see, e.g., Daly, M. et al., Nature Genet. 29:229-232 (2001); Patil, N. et al., Science 294:1719-1723 (2001); Dawson, E. et al., Nature 418:544-548 (2002); Zhang, K. et al., PNAS USA 99:7335-7339 (2002)), or as regions between transition zones having extensive historical recombination, identified using linkage disequilibrium (see, e.g., Gabriel, S. B. et al., Science 296:2225-2229 (2002); Phillips, M. S. et al., Nature Genet. 33:382-387 (2003); Wang, N. et al., Am. J. Hum. Genet. 71:1227-1234 (2002); Stumpf, M. P., and Goldstein, D. B., Curr. Biol. 13:1-8 (2003)). As used herein, the term, “haplotype block” includes blocks defined by either characteristic.

[0087] Representative methods for identification of haplotype blocks are set forth, for example, in U.S. Published Patent Applications 20030099964; 20030170665; 20040023237; 20040146870. Haplotype blocks can be used readily to map associations between phenotype and haplotype status. The main haplotytpes can be identified in each haplotype block, and then a set of “tagging” SNPs or markers (the smallest set of SNPs or markers needed to distinguish among the haplotypes) can then be identified. These tagging SNPs or markers can then be used in assessment of samples from groups of individuals, in order to identify association between phenotype and haplotype. If desired, neighboring haplotype blocks can be assessed concurrently, as there may also exist linkage disequilibrium among the haplotype blocks. In the instant invention, one such exemplary block is utilized (FIG. 12), wherein a region associated with KChIP1 is scanned for markers and haplotypes associated with Type II diabetes. Other blocks would be apparent to one of skill in the art as genetic regions in LD with KChIP1. Markers and haplotypes identified in these blocks, because of their association with KChIP1, are encompassed by the invention.

Haplotypes and Diagnostics

[0088] Certain haplotypes as described herein, e.g., having markers such as those shown in Table 2, Table 4, Table 5, Table 6, Table 13, Table 14, Table 16, Table 17 and Table 18 are found more frequently in individuals with Type II diabetes than in individuals without Type II diabetes. Therefore, these haplotypes have predictive value for detecting Type II diabetes or a susceptibility to Type II diabetes in an individual. In addition, haplotype blocks comprising certain tagging markers, can be found more frequently in individuals with Type II diabetes than in individuals without Type II diabetes. Therefore, these “at-risk” tagging markers within the haplotype blocks also have predictive value for detecting a susceptibility to Type II diabetes in an individual. “At-risk” tagging markers within the haplotype blocks can also include other markers that distinguish among the haplotypes, as these similarly have predictive value for detecting a susceptibility to Type II Diabetes.

[0089] The haplotypes and tagging markers useful herein are in some cases a combination of various genetic markers, e.g., SNPs and microsatellites. Therefore, detecting haplotypes can be accomplished by methods known in the art for detecting sequences at polymorphic sites, such as the methods described above. Furthermore, correlation between certain haplotypes or sets of tagging markers and disease phenotype can be verified using standard techniques. A representative example of a simple test for correlation would be a Fisher-exact test on a two by two table.

[0090] In specific embodiments, an at-risk haplotype in, or comprising portions of, the KChIP1 gene, is one where the haplotype is more frequently present in an individual at risk for Type II diabetes (affected), compared to the frequency of its presence in a healthy individual (control), and wherein the presence of the haplotype is indicative of Type II diabetes or susceptibility to Type II diabetes. In other embodiments, at risk tagging markers in a haplotype block in linkage disequilibrium with one or more markers in the KChIP1 gene, are tagging markers that are more frequently present in an individual at risk for Type II diabetes (affected), compared to the frequency of their presence in a healthy individual (control), and wherein the presence of the tagging markers is indicative of susceptibility to Type II diabetes. In a further embodiment, at-risk marks in linkage disequilibrium with one or more markers in the KChIP1 gene, are makers that are more frequently present in an individual at risk for Type II diabetes, compared to the frequency of their presence in a healthy individual (control), and wherein the presence of the markers is indicative of susceptibility to Type II diabetes. In particularly preferred embodiments of the invention, at-risk haplotypes include haplotypes as shown in Table 2, Table 4, Table 5, Table 6, Table 7, Table 9, Tables 11-14, Tables 16-18 and Tables 20-24.

[0091] In certain methods described herein, an individual who is at risk for Type II diabetes is an individual in whom an at-risk haplotype is identified, or an individual in whom at-risk tagging markers are identified. In one embodiment, significance associated with a haplotype is measured by an odds ratio. In a further embodiment, the significance is measured by a percentage. In one embodiment, a significant risk is measured as an odds ratio of at least about 1.2, including but not limited to: 1.2, 1.3, 1.4, 1.5, 1.6, 1.7, 1.8 and 1.9. In a further embodiment, an odds ratio of at least 1.2 is significant. In a further embodiment, an odds ratio of at least about 1.5 is significant. In a further embodiment, a significant increase in risk is at least about 1.7 is significant. In a further embodiment, a significant increase in risk is at least about 20%, including but not limited to about 25%, 30%, 35%, 40%, 45%, 50%, 55%, 60%, 65%, 70%, 75%, 80%, 85%, 90%, 95% and 98%. In a further embodiment, a significant increase in risk is at least about 50%. It is understood however, that identifying whether a risk is medically significant may also depend on a variety of factors, including the specific disease, the haplotype, and often, environmental factors.

[0092] Particular embodiments of the invention encompass methods including a method of diagnosing a susceptibility to Type II diabetes in an individual, comprising assessing in an individual the presence or frequency of SNPs and/or microsatellites in, comprising portions of, the KChIP1 gene, wherein an excess or higher frequency of the SNPs and/or microsatellites compared to a healthy control individual is indicative that the individual has Type II diabetes, or is susceptible to Type II diabetes. See, for example, Table 2, Table 4, Table 5, Table 6, Table 7, Table 9, Tables 11-14, Tables 16-18, Tables 20-24 and Table 26 (below) for SNPs and markers that can form haplotypes that can be used as screening tools. These markers and SNPs can be identified in at-risk haplotypes. For example, an at-risk haplotype can include microsatellite markers and/or SNPs such as those set forth in Table 2, Table 4, Table 5, Table 14, Table 16-18 and Table 26. The presence of the haplotype is indicative a susceptibility to Type II diabetes, and therefore is indicative of an individual who falls within a target population for the treatment methods described herein. These haplotypes can be used as screening tools. Other particular embodiments of the invention encompass methods of diagnosing a susceptibility to Type II diabetes in an individual, comprising detecting one or more markers at one or more polymorphic sites, wherein the one or more polymorphic sites are in linkage disequilibium with KChIP1 gene.

[0093] Individuals who have been identified as being susceptible to Type II diabetes using the methods described herein are individuals who fall within a target population for the methods of therapy described herein.

Nucleic Acid Therapeutic Agents

[0094] In another embodiment, a nucleic acid of the invention; a nucleic acid complementary to a nucleic acid of the invention; or a portion of such a nucleic acid (e.g., an oligonucleotide as described below); or a nucleic acid encoding a KChIP1 polypeptide, can be used in “antisense” therapy, in which a nucleic acid (e.g., an oligonucleotide) which specifically hybridizes to the mRNA and/or genomic DNA of a nucleic acid is administered or generated in situ. The antisense nucleic acid that specifically hybridizes to the mRNA and/or DNA inhibits expression of the polypeptide encoded by that mRNA and/or DNA, e.g., by inhibiting translation and/or transcription. Binding of the antisense nucleic acid can be by conventional base pair complementarity, or, for example, in the case of binding to DNA duplexes, through specific interaction in the major groove of the double helix.

[0095] An antisense construct can be delivered, for example, as an expression plasmid as described above. When the plasmid is transcribed in the cell, it produces RNA that is complementary to a portion of the mRNA and/or DNA that encodes a KChIP1 polypeptide. Alternatively, the antisense construct can be an oligonucleotide probe that is generated ex vivo and introduced into cells; it then inhibits expression by hybridizing with the mRNA and/or genomic DNA of the polypeptide. In one embodiment, the oligonucleotide probes are modified oligonucleotides that are resistant to endogenous nucleases, e.g., exonucleases and/or endonucleases, thereby rendering them stable in vivo. Exemplary nucleic acid molecules for use as antisense oligonucleotides are phosphoramidate, phosphothioate and methylphosphonate analogs of DNA (see also U.S. Pat. Nos. 5,176,996, 5,264,564 and 5,256,775). Additionally, general approaches to constructing oligomers useful in antisense therapy are also described, for example, by Van der Krol et al. (BioTechniques 6:958-976 (1988)); and Stein et al. (Cancer Res. 48:2659-2668 (1988)). With respect to antisense DNA, oligodeoxyribonucleotides derived from the translation initiation site are preferred.

[0096] To perform antisense therapy, oligonucleotides (mRNA, cDNA or DNA) are designed that are complementary to mRNA encoding the polypeptide. The antisense oligonucleotides bind to mRNA transcripts and prevent translation. Absolute complementarity, although preferred, is not required. A sequence “complementary” to a portion of an RNA, as referred to herein, indicates that a sequence has sufficient complementarity to be able to hybridize with the RNA, forming a stable duplex; in the case of double-stranded antisense nucleic acids, a single strand of the duplex DNA may thus be tested, or triplex formation may be assayed. The ability to hybridize will depend on both the degree of complementarity and the length of the antisense nucleic acid, as described in detail above. Generally, the longer the hybridizing nucleic acid, the more base mismatches with an RNA it may contain and still form a stable duplex (or triplex, as the case may be). One skilled in the art can ascertain a tolerable degree of mismatch by use of standard procedures.

[0097] The oligonucleotides used in antisense therapy can be DNA, RNA, or chimeric mixtures or derivatives or modified versions thereof, single-stranded or double-stranded. The oligonucleotides can be modified at the base moiety, sugar moiety, or phosphate backbone, for example, to improve stability of the molecule, hybridization, etc. The oligonucleotides can include other appended groups such as peptides (e.g., for targeting host cell receptors in vivo), or agents facilitating transport across the cell membrane (see, e.g., Letsinger et al., Proc. Natl. Acad. Sci. USA 86:6553-6556 (1989); Lemaitre et al., Proc. Natl. Acad. Sci. USA 84:648-652 (1987); PCT International Publication NO: WO 88/09810) or the blood-brain barrier (see, e.g., PCT International Publication NO: WO 89/10134), or hybridization-triggered cleavage agents (see, e.g., Krol et al., BioTechniques 6:958-976 (1988)) or intercalating agents. (See, e.g., Zon, Pharm. Res. 5: 539-549 (1988)). To this end, the oligonucleotide may be conjugated to another molecule (e.g., a peptide, hybridization triggered cross-linking agent, transport agent, hybridization-triggered cleavage agent).

[0098] The antisense molecules are delivered to cells that express a KChIP1 polypeptide in vivo. A number of methods can be used for delivering antisense DNA or RNA to cells; e.g., antisense molecules can be injected directly into the tissue site, or modified antisense molecules, designed to target the desired cells (e.g., antisense linked to peptides or antibodies that specifically bind receptors or antigens expressed on the target cell surface) can be administered systematically. Alternatively, in a another embodiment, a recombinant DNA construct is utilized in which the antisense oligonucleotide is placed under the control of a strong promoter (e.g. pol III or pol II). The use of such a construct to transfect target cells in the patient results in the transcription of sufficient amounts of single stranded RNAs that will form complementary base pairs with the endogenous transcripts and thereby prevent translation of the mRNA. For example, a vector can be introduced in vivo such that it is taken up by a cell and directs the transcription of an antisense RNA. Such a vector can remain episomal or become chromosomally integrated, as long as it can be transcribed to produce the desired antisense RNA. Such vectors can be constructed by recombinant DNA technology methods standard in the art and described above. For example, a plasmid, cosmid, YAC or viral vector can be used to prepare the recombinant DNA construct that can be introduced directly into the tissue site. Alternatively, viral vectors can be used which selectively infect the desired tissue, in which case administration may be accomplished by another route (e.g., systemically).

[0099] In another embodiment of the invention, small double-stranded interfering RNA (RNA interference (RNAi)) can be used. RNAi is a post-transcription process, in which double-stranded RNA is introduced and sequence-specific gene silencing results, though catalytic degradation of the targeted mRNA. See, e.g., Elbashir, S. M. et al., Nature 411:494-498 (2001); Lee, N. S., Nature Biotech. 19:500-505 (2002); Lee, S-K. et al., Nature Medicine 8(7):681-686 (2002); the entire teachings of these references are incorporated herein by reference. RNAi is used routinely to investigate gene function in a high throughput fashion or to modulate gene expression in human diseases (Chi et al., PNAS, 100 (11):6343-6346 (2003)).

[0100] Introduction of long double stranded RNA leads to sequence-specific degradation of homologous gene transcripts. The long double stranded RNA is metabolized to small 21-23 nucleotide siRNA (small interfering RNA). The siRNA then binds to protein complex RISC(RNA-induced silencing complex) with dual function helicase. The helicase has RNAase activity and is able to unwind the RNA. The unwound si RNA allows an antisense strand to bind to a target. This results in sequence dependent degradation of cognate mRNA. Aside from endogenous RNAi, exogenous RNAi, chemically synthesized or recombinantly produced can also be used.

[0101] Using non-intronic portions of the KChIP1 gene such as corresponding mRNA portions of SEQ ID NO: 1, target regions of the KChIP1 gene that are accessible for RNAi are targeted and silenced. With this technique it is possible to conduct a RNAi gene walk of the nucleic acids of KChIP1 and determine the amount of inhibition of the protein product. Thus, it is possible to design gene-specific therapeutics by directly targeting the mRNAs of Type II diabetes-related KChIP1 gene.

[0102] Endogenous expression of a gene product can also be reduced by inactivating or “knocking out” the gene or its promoter using targeted homologous recombination (e.g., see Smithies et al., Nature 317:230-234 (1985); Thomas & Capecchi, Cell 51:503-512 (1987); Thompson et al., Cell 5:313-321 (1989)). For example, an altered, non-functional gene (or a completely unrelated DNA sequence) flanked by DNA homologous to the endogenous gene (either the coding regions or regulatory regions of the gene) can be used, with or without a selectable marker and/or a negative selectable marker, to transfect cells that express the gene in vivo. Insertion of the DNA construct, via targeted homologous recombination, results in inactivation of the gene. The recombinant DNA constructs can be directly administered or targeted to the required site in vivo using appropriate vectors, as described above. Alternatively, expression of non-altered genes can be increased using a similar method: targeted homologous recombination can be used to insert a DNA construct comprising a non-altered functional gene, or the complement thereof, or a portion thereof, in place of an gene in the cell, as described above. In another embodiment, targeted homologous recombination can be used to insert a DNA construct comprising a nucleic acid that encodes a polypeptide variant that differs from that present in the cell.

[0103] Alternatively, endogenous expression of a gene product can be reduced by targeting deoxyribonucleotide sequences complementary to the regulatory region (i.e., the promoter and/or enhancers) to form triple helical structures that prevent transcription of the gene in target cells in the body. (See generally, Helene, C., Anticancer Drug Des., 6(6):569-84 (1991); Helene, C. et al., Ann. N.Y. Acad. Sci. 660:27-36 (1992); and Maher, L. J., Bioassays 14(12):807-15 (1992)). Likewise, the antisense constructs described herein, by antagonizing the normal biological activity of the gene product, can be used in the manipulation of tissue, e.g., tissue differentiation, both in vivo and for ex vivo tissue cultures. Furthermore, the anti-sense techniques (e.g., microinjection of antisense molecules, or transfection with plasmids whose transcripts are anti-sense with regard to a nucleic acid RNA or nucleic acid sequence) can be used to investigate the role of one or more members of the KChIP1 pathway in the development of disease-related conditions. Such techniques can be utilized in cell culture, but can also be used in the creation of transgenic animals.

[0104] The therapeutic agents as described herein can be delivered in a composition, as described above, or alone. They can be administered systemically, or can be targeted to a particular tissue. The therapeutic agents can be produced by a variety of means, including chemical synthesis; recombinant production; in vivo production (e.g., a transgenic animal, such as U.S. Pat. No. 4,873,316 to Meade et al.), for example, and can be isolated using standard means such as those described herein. In addition, a combination of any of the above methods of treatment (e.g., administration of non-altered polypeptide in conjunction with antisense therapy targeting altered mRNA; administration of a first splicing variant in conjunction with antisense therapy targeting a second splicing variant) can also be used.

[0105] The invention additionally pertains to use of such therapeutic agents, as described herein, for the manufacture of a medicament for the treatment of Type II diabetes e.g., using the methods described herein.

Monitoring Progress of Treatment

[0106] The current invention also pertains to methods of monitoring the effectiveness of treatment on the regulation of expression (e.g., relative or absolute expression) of one or more KChIP1 isoforms at the RNA or protein level or its enzymatic activity. KChIP1 message or protein or enzymatic activity can be measured in a sample of peripheral blood or cells derived therefrom. An assessment of the levels of expression or activity can be made before and during treatment with KChIP1 therapeutic agents. For example, in one embodiment of the invention, an individual who is a member of the target population can be assessed for response to treatment with a KChIP1 inhibitor, by examining calcium levels or Kv channel-interacting proteins activity or absolute and/or relative levels of KChIP1 protein or mRNA isoforms in peripheral blood in general or specific cell subfractions or combination of cell subfractions. In addition, variation such as haplotypes or mutations within or near (within 100 to 200 kb) of the KChIP1 gene may be used to identify individuals who are at higher risk for Type II diabetes to increase the power and efficiency of clinical trials for pharmaceutical agents to prevent or treat Type II diabetes. The haplotypes and other variations may be used to exclude or fractionate patients in a clinical trial who are likely to have non-KChIP1 involvement in their Type II diabetes risk in order to enrich patients who have other genes or pathways involved and boost the power and sensitivity of the clinical trial. Such variation may be used as a pharmacogenomic test to guide selection of pharmaceutical agents for individuals.

[0107] Described herein is the first known linkage study of Type II diabetes showing a connection to chromosome 5q35. Based on the linkage studies conducted, a direct relationship between Type II diabetes and the locus on chromosome 5q35, in particular the KChIP1 gene, has been discovered.

Nucleic Acids of the Invention

KChIP1 Nucleic Acids, Portions and Variants

[0108] Accordingly, the invention pertains to isolated nucleic acid molecules comprising human KChIP1 nucleic acid. The term, “KChIP1 nucleic acid,” as used herein, refers to an isolated nucleic acid molecule encoding a KChIP1 polypeptide (e.g., a KChIP1 gene, such as shown in SEQ ID NO:1). The KChIP1 nucleic acid molecules of the present invention can be RNA, for example, mRNA, or DNA, such as cDNA and genomic DNA. DNA molecules can be double-stranded or single-stranded; single stranded RNA or DNA can be either the coding, or sense, strand or the non-coding, or antisense strand. The nucleic acid molecule can include all or a portion of the coding sequence of the gene and can further comprise additional non-coding sequences such as introns and non-coding 3′ and 5′ sequences (including regulatory sequences, for example).

[0109] For example, the KChIP1 nucleic acid can the genomic sequence shown in FIG. 1, or a portion or fragment of the isolated nucleic acid molecule (e.g., cDNA or the gene) that encodes KChIP1 polypeptide. In certain embodiments, the isolated nucleic acid molecule comprises a nucleic acid molecule selected from the group consisting of SEQ ID NOs: 1 and 114-258 (e.g., in Table 10) or the complement of such a nucleic acid molecule.

[0110] Additionally, nucleic acid molecules of the invention can be fused to a marker sequence, for example, a sequence that encodes a polypeptide to assist in isolation or purification of the polypeptide. Such sequences include, but are not limited to, those that encode a glutathione-S-transferase (GST) fusion protein and those that encode a hemagglutinin A (HA) polypeptide marker from influenza.

[0111] An “isolated” nucleic acid molecule, as used herein, is one that is separated from nucleic acids that normally flank the gene or nucleotide sequence (as in genomic sequences) and/or has been completely or partially purified from other transcribed sequences (e.g., as in an RNA library). For example, an isolated nucleic acid of the invention may be substantially isolated with respect to the complex cellular milieu in which it naturally occurs, or culture medium when produced by recombinant techniques, or chemical precursors or other chemicals when chemically synthesized. In some instances, the isolated material will form part of a composition (for example, a crude extract containing other substances), buffer system or reagent mix. In other circumstances, the material may be purified to essential homogeneity, for example as determined by PAGE or column chromatography such as HPLC. Preferably, an isolated nucleic acid molecule comprises at least about 50, 80 or 90% (on a molar basis) of all macromolecular species present. With regard to genomic DNA, the term “isolated” also can refer to nucleic acid molecules that are separated from the chromosome with which the genomic DNA is naturally associated. For example, the isolated nucleic acid molecule can contain less than about 5 kb but not limited to 4 kb, 3 kb, 2 kb, 1 kb, 0.5 kb or 0.1 kb of nucleotides which flank the nucleic acid molecule in the genomic DNA of the cell from which the nucleic acid molecule is derived.

[0112] The nucleic acid molecule can be fused to other coding or regulatory sequences and still be considered isolated. Thus, recombinant DNA contained in a vector is included in the definition of “isolated” as used herein. Also, isolated nucleic acid molecules include recombinant DNA molecules in heterologous host cells, as well as partially or substantially purified DNA molecules in solution. “Isolated” nucleic acid molecules also encompass in vivo and in vitro RNA transcripts of the DNA molecules of the present invention. An isolated nucleic acid molecule can include a nucleic acid molecule or nucleic acid sequence that is synthesized chemically or by recombinant means. Therefore, recombinant DNA contained in a vector is included in the definition of “isolated” as used herein. Also, isolated nucleic acid molecules include recombinant DNA molecules in heterologous organisms, as well as partially or substantially purified DNA molecules in solution. In vivo and in vitro RNA transcripts of the DNA molecules of the present invention are also encompassed by “isolated” nucleic acid sequences. Such isolated nucleic acid molecules are useful in the manufacture of the encoded polypeptide, as probes for isolating homologous sequences (e.g., from other mammalian species), for gene mapping (e.g., by in situ hybridization with chromosomes), or for detecting expression of the gene in tissue (e.g., human tissue), such as by Northern blot analysis.

[0113] The present invention also pertains to nucleic acid molecules which are not necessarily found in nature but which encode a KChIP1 polypeptide, or another splicing variant of a KChIP1 polypeptide or polymorphic variant thereof. Thus, for example, the invention pertains to DNA molecules comprising a sequence that is different from the naturally occurring nucleotide sequence but which, due to the degeneracy of the genetic code, encode a KChIP1 polypeptide of the present invention. The invention also encompasses nucleic acid molecules encoding portions (fragments), or encoding variant polypeptides such as analogues or derivatives of a KChIP1 polypeptide. Such variants can be naturally occurring, such as in the case of allelic variation or single nucleotide polymorphisms, or non-naturally-occurring, such as those induced by various mutagens and mutagenic processes. Intended variations include, but are not limited to, addition, deletion and substitution of one or more nucleotides that can result in conservative or non-conservative amino acid changes, including additions and deletions. Preferably the nucleotide (and/or resultant amino acid) changes are silent or conserved; that is, they do not alter the characteristics or activity of a KChIP1 polypeptide. In one embodiment, the nucleic acid sequences are fragments that comprise one or more polymorphic microsatellite markers. In another embodiment, the nucleotide sequences are fragments that comprise one or more single nucleotide polymorphisms in a KChIP1 gene.

[0114] Other alterations of the nucleic acid molecules of the invention can include, for example, labeling, methylation, internucleotide modifications such as uncharged linkages (e.g., methyl phosphonates, phosphotriesters, phosphoamidates, carbamates), charged linkages (e.g., phosphorothioates, phosphorodithioates), pendent moieties (e.g., polypeptides), intercalators (e.g., acridine, psoralen), chelators, alkylators, and modified linkages (e.g., alpha anomeric nucleic acids). Also included are synthetic molecules that mimic nucleic acid molecules in the ability to bind to a designated sequence via hydrogen bonding and other chemical interactions. Such molecules include, for example, those in which peptide linkages substitute for phosphate linkages in the backbone of the molecule.

[0115] The invention also pertains to nucleic acid molecules that hybridize under high stringency hybridization conditions, such as for selective hybridization, to a nucleotide sequence described herein (e.g., nucleic acid molecules which specifically hybridize to a nucleotide sequence encoding polypeptides described herein, and, optionally, have an activity of the polypeptide). In one embodiment, the invention includes variants described herein which hybridize under high stringency hybridization conditions (e.g., for selective hybridization) to a nucleotide sequence comprising a nucleotide sequence selected from the group consisting of SEQ ID NOs: 114-258. In another embodiment, the invention includes variants described herein that hybridize under high stringency hybridization conditions (e.g., for selective hybridization) to a nucleotide sequence encoding an amino acid sequence or a polymorphic variant thereof. In another embodiment, the variant that hybridizes under high stringency hybridizations has an activity of a KChIP1 polypeptide.

[0116] Such nucleic acid molecules can be detected and/or isolated by specific hybridization (e.g., under high stringency conditions). “Specific hybridization,” as used herein, refers to the ability of a first nucleic acid to hybridize to a second nucleic acid in a manner such that the first nucleic acid does not hybridize to any nucleic acid other than to the second nucleic acid (e.g., when the first nucleic acid has a higher similarity to the second nucleic acid than to any other nucleic acid in a sample wherein the hybridization is to be performed). “Stringency conditions” for hybridization is a term of art which refers to the incubation and wash conditions, e.g., conditions of temperature and buffer concentration, which permit hybridization of a particular nucleic acid to a second nucleic acid; the first nucleic acid may be perfectly (i.e., 100%) complementary to the second, or the first and second may share some degree of complementarity which is less than perfect (e.g., 70%, 75%, 85%, 90%, 95%). For example, certain high stringency conditions can be used which distinguish perfectly complementary nucleic acids from those of less complementarity. “High stringency conditions”, “moderate stringency conditions” and “low stringency conditions” for nucleic acid hybridizations are explained on pages 2.10.1-2.10.16 and pages 6.3.1-6.3.6 in Current Protocols in Molecular Biology (Ausubel, F. M. et al., “Current Protocols in Molecular Biology”, John Wiley & Sons, (2001)), the entire teachings of which are incorporated by reference herein). The exact conditions which determine the stringency of hybridization depend not only on ionic strength (e.g., 0.2×SSC, 0.1×SSC), temperature (e.g., room temperature, 42° C., 68° C.) and the concentration of destabilizing agents such as formamide or denaturing agents such as SDS, but also on factors such as the length of the nucleic acid sequence, base composition, percent mismatch between hybridizing sequences and the frequency of occurrence of subsets of that sequence within other non-identical sequences. Thus, equivalent conditions can be determined by varying one or more of these parameters while maintaining a similar degree of identity or similarity between the two nucleic acid molecules. Typically, conditions are used such that sequences at least about 60%, at least about 70%, at least about 80%, at least about 90%, or at least about 95% or more identical to each other remain hybridized to one another. By varying hybridization conditions from a level of stringency at which no hybridization occurs to a level at which hybridization is first observed, conditions which will allow a given sequence to hybridize (e.g., selectively) with the most similar sequences in the sample can be determined.

[0117] Exemplary conditions are described in Krause, M. H. and S. A. Aaronson, Methods in Enzymology 200:546-556 (1991), and in, Ausubel, et al., “Current Protocols in Molecular Biology”, John Wiley & Sons, (2001), which describes the determination of washing conditions for moderate or low stringency conditions. Washing is the step in which conditions are usually set so as to determine a minimum level of complementarity of the hybrids. Generally, starting from the lowest temperature at which only homologous hybridization occurs, each ° C. by which the final wash temperature is reduced (holding SSC concentration constant) allows an increase by 1% in the maximum extent of mismatching among the sequences that hybridize. Generally, doubling the concentration of SSC results in an increase in Tₘ of −17° C. Using these guidelines, the washing temperature can be determined empirically for high, moderate or low stringency, depending on the level of mismatch sought.

[0118] For example, a low stringency wash can comprise washing in a solution containing 0.2×SSC/0.1% SDS for 10 minutes at room temperature; a moderate stringency wash can comprise washing in a pre-warmed solution (42° C.) solution containing 0.2×SSC/0.1% SDS for 15 minutes at 42° C.; and a high stringency wash can comprise washing in pre-warmed (68° C.) solution containing 0.1×SSC/0.1% SDS for 15 minutes at 68° C. Furthermore, washes can be performed repeatedly or sequentially to obtain a desired result as known in the art. Equivalent conditions can be determined by varying one or more of the parameters given as an example, as known in the art, while maintaining a similar degree of identity or similarity between the target nucleic acid molecule and the primer or probe used.

[0119] The percent homology or identity of two nucleotide or amino acid sequences can be determined by aligning the sequences for optimal comparison purposes (e.g., gaps can be introduced in the sequence of a first sequence for optimal alignment). The nucleotides or amino acids at corresponding positions are then compared, and the percent identity between the two sequences is a function of the number of identical positions shared by the sequences (i.e., % identity=# of identical positions/total # of positions×100). When a position in one sequence is occupied by the same nucleotide or amino acid residue as the corresponding position in the other sequence, then the molecules are homologous at that position. As used herein, nucleic acid or amino acid “homology” is equivalent to nucleic acid or amino acid “identity”. In certain embodiments, the length of a sequence aligned for comparison purposes is at least 30%, for example, at least 40%, in certain embodiments at least 60%, and in other embodiments at least 70%, 80%, 90% or 95% of the length of the reference sequence. The actual comparison of the two sequences can be accomplished by well-known methods, for example, using a mathematical algorithm. A preferred, non-limiting example of such a mathematical algorithm is described in Karlin et al., Proc. Natl. Acad. Sci. USA 90:5873-5877 (1993). Such an algorithm is incorporated into the NBLAST and XBLAST programs (version 2.0) as described in Altschul et al., Nucleic Acids Res. 25:389-3402 (1997). When utilizing BLAST and Gapped BLAST programs, the default parameters of the respective programs (e.g., NBLAST) can be used. In one embodiment, parameters for sequence comparison can be set at score=100, wordlength=12, or can be varied (e.g., W=5 or W=20).

[0120] Another preferred, non-limiting example of a mathematical algorithm utilized for the comparison of sequences is the algorithm of Myers and Miller, CABIOS 4(1): 11-17 (1988). Such an algorithm is incorporated into the ALIGN program (version 2.0) which is part of the GCG sequence alignment software package (Accelrys, Cambridge, UK). When utilizing the ALIGN program for comparing amino acid sequences, a PAM120 weight residue table, a gap length penalty of 12, and a gap penalty of 4 can be used. Additional algorithms for sequence analysis are known in the art and include ADVANCE and ADAM as described in Torellis and Robotti, Comput. Appl. Biosci. 10:3-5 (1994); and FASTA described in Pearson and Lipman, Proc. Natl. Acad. Sci. USA 85:2444-8 (1988).

[0121] In another embodiment, the percent identity between two amino acid sequences can be accomplished using the GAP program in the GCG software package using either a BLOSUM63 matrix or a PAM250 matrix, and a gap weight of 12, 10, 8, 6, or 4 and a length weight of 2, 3, or 4. In yet another embodiment, the percent identity between two nucleic acid sequences can be accomplished using the GAP program in the GCG software package using a gap weight of 50 and a length weight of 3.

[0122] The present invention also provides isolated nucleic acid molecules that contain a fragment or portion that hybridizes under highly stringent conditions to a nucleotide sequence comprising a nucleotide sequence selected from the group consisting of SEQ ID NOs: 1, 114-258, or the complement of such a sequence, and also provides isolated nucleic acid molecules that contain a fragment or portion that hybridizes under highly stringent conditions to a nucleotide sequence encoding an amino acid sequence or polymorphic variant thereof. The nucleic acid fragments of the invention are at least about 15, preferably at least about 18, 20, 23 or 25 nucleotides, and can be 30, 40, 50, 100, 200 or more nucleotides in length. Longer fragments, for example, 30 or more nucleotides in length, that encode antigenic polypeptides described herein are particularly useful, such as for the generation of antibodies as described below.

Probes and Primers

[0123] In a related aspect, the nucleic acid fragments of the invention are used as probes or primers in assays such as those described herein. “Probes” or “primers” are oligonucleotides that hybridize in a base-specific manner to a complementary strand of nucleic acid molecules. Such probes and primers include polypeptide nucleic acids, as described in Nielsen et al., Science 254:1497-1500 (1991).

[0124] A probe or primer comprises a region of nucleotide sequence that hybridizes to at least about 15, for example about 20-25, and in certain embodiments about 40, 50 or 75, consecutive nucleotides of a nucleic acid molecule comprising a contiguous nucleotide sequence selected from the group consisting of SEQ ID NOs: 1, 114-258 or polymorphic variant thereof. In other embodiments, a probe or primer comprises 100 or fewer nucleotides, in certain embodiments from 6 to 50 nucleotides, for example from 12 to 30 nucleotides. In other embodiments, the probe or primer is at least 70% identical to the contiguous nucleotide sequence or to the complement of the contiguous nucleotide sequence, for example at least 80% identical, in certain embodiments at least 90% identical, and in other embodiments at least 95% identical, or even capable of selectively hybridizing to the contiguous nucleotide sequence or to the complement of the contiguous nucleotide sequence. Often, the probe or primer further comprises a label, e.g., radioisotope, fluorescent compound, enzyme, or enzyme co-factor.

[0125] The nucleic acid molecules of the invention such as those described above can be identified and isolated using standard molecular biology techniques and the sequence information provided herein. For example, nucleic acid molecules can be amplified and isolated by the polymerase chain reaction using synthetic oligonucleotide primers designed based on one or more of the sequences selected from the group consisting of SEQ ID NOs: 1, 114-258 or the complement of such a sequence, or designed based on nucleotides based on sequences encoding one or more of the amino acid sequences provided herein. See generally PCR Technology: Principles and Applications for DNA Amplification (ed. H. A. Erlich, Freeman Press, NY, N.Y., 1992); PCR Protocols: A Guide to Methods and Applications (Eds. Innis et al., Academic Press, San Diego, Calif., 1990); Mattila et al., Nucl. Acids Res. 19: 4967 (1991); Eckert et al., PCR Methods and Applications 1:17 (1991); PCR (eds. McPherson et al., IRL Press, Oxford); and U.S. Pat. No. 4,683,202. The nucleic acid molecules can be amplified using cDNA, mRNA or genomic DNA as a template, cloned into an appropriate vector and characterized by DNA sequence analysis.

[0126] Other suitable amplification methods include the ligase chain reaction (LCR) (see Wu and Wallace, Genomics 4:560 (1989), Landegren et al., Science 241:1077 (1988), transcription amplification (Kwoh et al., Proc. Natl. Acad. Sci. USA 86:1173 (1989)), and self-sustained sequence replication (Guatelli et al., Proc. Nat. Acad. Sci. USA 87:1874 (1990)) and nucleic acid based sequence amplification (NASBA). The latter two amplification methods involve isothermal reactions based on isothermal transcription, which produce both single stranded RNA (ssRNA) and double stranded DNA (dsDNA) as the amplification products in a ratio of about 30 or 100 to 1, respectively.

[0127] The amplified DNA can be labeled, for example, radiolabeled, and used as a probe for screening a cDNA library derived from human cells, mRNA in zap express, ZIPLOX or other suitable vector. Corresponding clones can be isolated, DNA can obtained following in vivo excision, and the cloned insert can be sequenced in either or both orientations by art recognized methods to identify the correct reading frame encoding a polypeptide of the appropriate molecular weight. For example, the direct analysis of the nucleotide sequence of nucleic acid molecules of the present invention can be accomplished using well-known methods that are commercially available. See, for example, Sambrook et al., Molecular Cloning, A Laboratory Manual (2nd Ed., CSHP, New York 1989); Zyskind et al., Recombinant DNA Laboratory Manual, (Acad. Press, 1988)). Additionally, fluorescence methods are also available for analyzing nucleic acids (Chen et al., Genome Res. 9, 492 (1999)) and polypeptides. Using these or similar methods, the polypeptide and the DNA encoding the polypeptide can be isolated, sequenced and further characterized.

[0128] Antisense nucleic acid molecules of the invention can be designed using the nucleotide sequences of one or more of SEQ ID NOs: 1, 114-258 and/or the complement of one or more of SEQ ID NOs: 1, 114-258 and/or a portion of one or more of SEQ ID NOs: 1, 114-258 or the complement of one or more of SEQ ID NOs: 1, 114-258 and constructed using chemical synthesis and enzymatic ligation reactions using procedures known in the art. For example, an antisense nucleic acid molecule (e.g., an antisense oligonucleotide) can be chemically synthesized using naturally occurring nucleotides or variously modified nucleotides designed to increase the biological stability of the molecules or to increase the physical stability of the duplex formed between the antisense and sense nucleic acids, e.g., phosphorothioate derivatives and acridine substituted nucleotides can be used. Alternatively, the antisense nucleic acid molecule can be produced biologically using an expression vector into which a nucleic acid molecule has been subcloned in an antisense orientation (i.e., RNA transcribed from the inserted nucleic acid molecule will be of an antisense orientation to a target nucleic acid of interest).

[0129] The nucleic acid sequences can also be used to compare with endogenous DNA sequences in patients to identify one or more of the disorders described above, and as probes, such as to hybridize and discover related DNA sequences or to subtract out known sequences from a sample. The nucleic acid sequences can further be used to derive primers for genetic fingerprinting, to raise anti-polypeptide antibodies using DNA immunization techniques, and as an antigen to raise anti-DNA antibodies or elicit immune responses. Portions or fragments of the nucleotide sequences identified herein (and the corresponding complete gene sequences) can be used in numerous ways as polynucleotide reagents. For example, these sequences can be used to: (i) map their respective genes on a chromosome; and, thus, locate gene regions associated with genetic disease; (ii) identify an individual from a minute biological sample (tissue typing); and (iii) aid in forensic identification of a biological sample. Additionally, the nucleotide sequences of the invention can be used to identify and express recombinant polypeptides for analysis, characterization or therapeutic use, or as markers for tissues in which the corresponding polypeptide is expressed, either constitutively, during tissue differentiation, or in diseased states. The nucleic acid sequences can additionally be used as reagents in the screening and/or diagnostic assays described herein, and can also be included as components of kits (e.g., reagent kits) for use in the screening and/or diagnostic assays described herein.

Vectors and Host Cells

[0130] Another aspect of the invention pertains to nucleic acid constructs containing a nucleic acid molecule selected from the group consisting of SEQ ID NOs: 1, 114-258 and the complements thereof (or a portion thereof). The constructs comprise a vector (e.g., an expression vector) into which a sequence of the invention has been inserted in a sense or antisense orientation. As used herein, the term “vector” refers to a nucleic acid molecule capable of transporting another nucleic acid to which it has been linked. One type of vector is a “plasmid,” which refers to a circular double stranded DNA loop into which additional DNA segments can be ligated. Another type of vector is a viral vector, wherein additional DNA segments can be ligated into the viral genome. Certain vectors are capable of autonomous replication in a host cell into which they are introduced (e.g., bacterial vectors having a bacterial origin of replication and episomal mammalian vectors). Other vectors (e.g., non-episomal mammalian vectors) are integrated into the genome of a host cell upon introduction into the host cell, and thereby are replicated along with the host genome. Expression vectors are capable of directing the expression of genes to which they are operably linked. In general, expression vectors of utility in recombinant DNA techniques are often in the form of plasmids. However, the invention is intended to include such other forms of expression vectors, such as viral vectors (e.g., replication defective retroviruses, adenoviruses and adeno-associated viruses) that serve equivalent functions.

[0131] In certain embodiments, recombinant expression vectors of the invention comprise a nucleic acid molecule of the invention in a form suitable for expression of the nucleic acid molecule in a host cell. This means that the recombinant expression vectors include one or more regulatory sequences, selected on the basis of the host cells to be used for expression, which is operably linked to the nucleic acid sequence to be expressed. Within a recombinant expression vector, “operably linked” or “operatively linked” is intended to mean that the nucleotide sequence of interest is linked to the regulatory sequence(s) in a manner which allows for expression of the nucleotide sequence (e.g., in an in vitro transcription/translation system or in a host cell when the vector is introduced into the host cell). The term “regulatory sequence” is intended to include promoters, enhancers and other expression control elements (e.g., polyadenylation signals). Such regulatory sequences are described, for example, in Goeddel, “Gene Expression Technology”, Methods in Enzymology 185, Academic Press, San Diego, Calif. (1990). Regulatory sequences include those which direct constitutive expression of a nucleotide sequence in many types of host cell and those which direct expression of the nucleotide sequence only in certain host cells (e.g., tissue-specific regulatory sequences). It will be appreciated by those skilled in the art that the design of the expression vector can depend on such factors as the choice of the host cell to be transformed and the level of expression of polypeptide desired. The expression vectors of the invention can be introduced into host cells to thereby produce polypeptides, including fusion polypeptides, encoded by nucleic acid molecules as described herein.

[0132] The recombinant expression vectors of the invention can be designed for expression of a polypeptide of the invention in prokaryotic or eukaryotic cells, e.g., bacterial cells such as E. coli, insect cells (using baculovirus expression vectors), yeast cells or mammalian cells. Suitable host cells are discussed further in Goeddel, supra. Alternatively, the recombinant expression vector can be transcribed and translated in vitro, for example using T7 promoter regulatory sequences and T7 polymerase.

[0133] Another aspect of the invention pertains to host cells into which a recombinant expression vector of the invention has been introduced. The terms “host cell” and “recombinant host cell” are used interchangeably herein. It is understood that such terms refer not only to the particular subject cell but also to the progeny or potential progeny of such a cell. Because certain modifications may occur in succeeding generations due to either mutation or environmental influences, such progeny may not, in fact, be identical to the parent cell, but are still included within the scope of the term as used herein.

[0134] A host cell can be any prokaryotic or eukaryotic cell. For example, a nucleic acid molecule of the invention can be expressed in bacterial cells (e.g., E. coli), insect cells, yeast or mammalian cells (such as Chinese hamster ovary cells (CHO) or COS cells). Other suitable host cells are known to those skilled in the art.

[0135] Vector DNA can be introduced into prokaryotic or eukaryotic cells via conventional transformation or transfection techniques. As used herein, the terms “transformation” and “transfection” are intended to refer to a variety of art-recognized techniques for introducing a foreign nucleic acid molecule (e.g., DNA) into a host cell, including calcium phosphate or calcium chloride co-precipitation, DEAE-dextran-mediated transfection, lipofection, or electroporation. Suitable methods for transforming or transfecting host cells can be found in Sambrook, et al., (supra), and other laboratory manuals.

[0136] For stable transfection of mammalian cells, it is known that, depending upon the expression vector and transfection technique used, only a small fraction of cells may integrate the foreign DNA into their genome. In order to identify and select these integrants, a gene that encodes a selectable marker (e.g., for resistance to antibiotics) is generally introduced into the host cells along with the gene of interest. Preferred selectable markers include those that confer resistance to drugs, such as G418, hygromycin and methotrexate. Nucleic acid molecules encoding a selectable marker can be introduced into a host cell on the same vector as the nucleic acid molecule of the invention or can be introduced on a separate vector. Cells stably transfected with the introduced nucleic acid molecule can be identified by drug selection (e.g., cells that have incorporated the selectable marker gene will survive, while the other cells die).

[0137] A host cell of the invention, such as a prokaryotic or eukaryotic host cell in culture, can be used to produce (i.e., express) a polypeptide of the invention. Accordingly, the invention further provides methods for producing a polypeptide using the host cells of the invention. In one embodiment, the method comprises culturing the host cell of invention (into which a recombinant expression vector encoding a polypeptide of the invention has been introduced) in a suitable medium such that the polypeptide is produced. In another embodiment, the method further comprises isolating the polypeptide from the medium or the host cell.

[0138] The host cells of the invention can also be used to produce nonhuman transgenic animals. For example, in one embodiment, a host cell of the invention is a fertilized oocyte or an embryonic stem cell into which a nucleic acid molecule of the invention has been introduced (e.g., an exogenous KChIP1 gene, or an exogenous nucleic acid encoding a KChIP1 polypeptide). Such host cells can then be used to create non-human transgenic animals in which exogenous nucleotide sequences have been introduced into the genome or homologous recombinant animals in which endogenous nucleotide sequences have been altered. Such animals are useful for studying the function and/or activity of the nucleotide sequence and polypeptide encoded by the sequence and for identifying and/or evaluating modulators of their activity. As used herein, a “transgenic animal” is a non-human animal, preferably a mammal, more preferably a rodent such as a rat or mouse, in which one or more of the cells of the animal include a transgene. Other examples of transgenic animals include non-human primates, sheep, dogs, cows, goats, chickens and amphibians. A transgene is exogenous DNA which is integrated into the genome of a cell from which a transgenic animal develops and which remains in the genome of the mature animal, thereby directing the expression of an encoded gene product in one or more cell types or tissues of the transgenic animal. As used herein, an “homologous recombinant animal” is a non-human animal, preferably a mammal, more preferably a mouse, in which an endogenous gene has been altered by homologous recombination between the endogenous gene and an exogenous DNA molecule introduced into a cell of the animal, e.g., an embryonic cell of the animal, prior to development of the animal.

[0139] Methods for generating transgenic animals via embryo manipulation and microinjection, particularly animals such as mice, have become conventional in the art and are described, for example, in U.S. Pat. Nos. 4,736,866 and 4,870,009, U.S. Pat. No. 4,873,191 and in Hogan, Manipulating the Mouse Embryo (Cold Spring Harbor Laboratory Press, Cold Spring Harbor, N.Y., 1986). Methods for constructing homologous recombination vectors and homologous recombinant animals are described further in Bradley, Current Opinion in BioTechnology 2:823-829 (1991) and in PCT Publication Nos. WO 90/11354, WO 91/01140, WO 92/0968, and WO 93/04169. Clones of the non-human transgenic animals described herein can also be produced according to the methods described in Wilmut et al., Nature 385:810-813 (1997) and PCT Publication Nos. WO 97/07668 and WO 97/07669.

Polypeptides of the Invention

[0140] The present invention also pertains to isolated polypeptides encoded by KChIP1 nucleic acids (“KChIP1 polypeptides,” or “KChIP1 proteins,” such as the protein shown in SEQ ID NO: 2) and fragments and variants thereof, as well as polypeptides encoded by nucleotide sequences described herein (e.g., other splicing variants). The term “polypeptide” refers to a polymer of amino acids, and not to a specific length; thus, peptides, oligopeptides and proteins are included within the definition of a polypeptide. As used herein, a polypeptide is said to be “isolated” or “purified” when it is substantially free of cellular material when it is isolated from recombinant and non-recombinant cells, or free of chemical precursors or other chemicals when it is chemically synthesized. A polypeptide, however, can be joined to another polypeptide with which it is not normally associated in a cell (e.g., in a “fusion protein”) and still be “isolated” or “purified.”

[0141] The polypeptides of the invention can be purified to homogeneity. It is understood, however, that preparations in which the polypeptide is not purified to homogeneity are useful. The critical feature is that the preparation allows for the desired function of the polypeptide, even in the presence of considerable amounts of other components. Thus, the invention encompasses various degrees of purity. In one embodiment, the language “substantially free of cellular material” includes preparations of the polypeptide having less than about 30% (by dry weight) other proteins (i.e., contaminating protein), less than about 20% other proteins, less than about 10% other proteins, or less than about 5% other proteins.

[0142] When a polypeptide is recombinantly produced, it can also be substantially free of culture medium, i.e., culture medium represents less than about 20%, less than about 10%, or less than about 5% of the volume of the polypeptide preparation. The language “substantially free of chemical precursors or other chemicals” includes preparations of the polypeptide in which it is separated from chemical precursors or other chemicals that are involved in its synthesis. In one embodiment, the language “substantially free of chemical precursors or other chemicals” includes preparations of the polypeptide having less than about 30% (by dry weight) chemical precursors or other chemicals, less than about 20% chemical precursors or other chemicals, less than about 10% chemical precursors or other chemicals, or less than about 5% chemical precursors or other chemicals.

[0143] In one embodiment, a polypeptide of the invention comprises an amino acid sequence encoded by a nucleic acid molecule comprising a nucleotide sequence of SEQ ID NO: 1, optionally additionally comprising one or more of SEQ ID NOs: 114-258; or the complement of such a nucleic acid, or portions thereof, or a portion or polymorphic variant thereof. However, the polypeptides of the invention also encompass fragment and sequence variants. Variants include a substantially homologous polypeptide encoded by the same genetic locus in an organism, i.e., an allelic variant, as well as other splicing variants. Variants also encompass polypeptides derived from other genetic loci in an organism, but having substantial homology to a polypeptide encoded by a nucleic acid molecule comprising a nucleotide of SEQ ID NO: 1, optionally additionally one or more of SEQ ID NOs: 114-258; or a complement of such a sequence, or portions thereof or polymorphic variants thereof. Variants also include polypeptides substantially homologous or identical to these polypeptides but derived from another organism, i.e., an ortholog. Variants also include polypeptides that are substantially homologous or identical to these polypeptides that are produced by chemical synthesis. Variants also include polypeptides that are substantially homologous or identical to these polypeptides that are produced by recombinant methods.

[0144] As used herein, two polypeptides (or a region of the polypeptides) are substantially homologous or identical when the amino acid sequences are at least about 45-55%, in certain embodiments at least about 70-75%, and in other embodiments at least about 80-85%, and in other embodiments greater than about 90% or more homologous or identical. A substantially homologous amino acid sequence, according to the present invention, will be encoded by a nucleic acid molecule hybridizing to of SEQ ID NO: 1 or any one of 114-258 or portion thereof, under stringent conditions as more particularly described above, or will be encoded by a nucleic acid molecule hybridizing to a nucleic acid sequence encoding SEQ ID NO: 1 or any one of 114-258 or a portion thereof or polymorphic variant thereof, under stringent conditions as more particularly described thereof.

[0145] The invention also encompasses polypeptides having a lower degree of identity but having sufficient similarity so as to perform one or more of the same functions performed by a polypeptide encoded by a nucleic acid molecule of the invention.

[0146] Similarity is determined by conserved amino acid substitution where a given amino acid in a polypeptide is substituted by another amino acid of like characteristics. Conservative substitutions are likely to be phenotypically silent. Typically seen as conservative substitutions are the replacements, one for another, among the aliphatic amino acids Ala, Val, Leu and Ile; interchange of the hydroxyl residues Ser and Thr, exchange of the acidic residues Asp and Glu, substitution between the amide residues Asn and Gln, exchange of the basic residues Lys and Arg and replacements among the aromatic residues Phe and Tyr. Guidance concerning which amino acid changes are likely to be phenotypically silent are found in Bowie et al., Science 247:1306-1310 (1990).

[0147] A variant polypeptide can differ in amino acid sequence by one or more substitutions, deletions, insertions, inversions, fusions, and truncations or a combination of any of these. Further, variant polypeptides can be fully functional or can lack function in one or more activities. Fully functional variants typically contain only conservative variation or variation in non-critical residues or in non-critical regions. Functional variants can also contain substitution of similar amino acids that result in no change or an insignificant change in function. Alternatively, such substitutions may positively or negatively affect function to some degree. Non-functional variants typically contain one or more non-conservative amino acid substitutions, deletions, insertions, inversions, or truncation or a substitution, insertion, inversion, or deletion in a critical residue or critical region.

[0148] Amino acids that are essential for function can be identified by methods known in the art, such as site-directed mutagenesis or alanine-scanning mutagenesis (Cunningham et al., Science 244:1082-1185 (1989)). The latter procedure introduces single alanine mutations at every residue in the molecule. The resulting mutant molecules are then tested for biological activity in vitro, or in vitro proliferative activity. Sites that are critical for polypeptide activity can also be determined by structural analysis such as crystallization, nuclear magnetic resonance or photoaffinity labeling (Smith et al., J. Mol. Biol. 224:899-904 (1992); de Vos et al., Science 255:306-312 (1992)).

[0149] The invention also includes polypeptide fragments of the polypeptides of the invention. Fragments can be derived from a polypeptide encoded by a nucleic acid molecule comprising SEQ ID NO: 1 and optionally comprising one or more of SEQ ID NOs: 114-258; or a complement of such a nucleic acid or other variants. However, the invention also encompasses fragments of the variants of the polypeptides described herein. As used herein, a fragment comprises at least 6 contiguous amino acids. Useful fragments include those that retain one or more of the biological activities of the polypeptide as well as fragments that can be used as an immunogen to generate polypeptide-specific antibodies.

[0150] Biologically active fragments (peptides which are, for example, 6, 9, 12, 15, 16, 20, 30, 35, 36, 37, 38, 39, 40, 50, 100 or more amino acids in length) can comprise a domain, segment, or motif that has been identified by analysis of the polypeptide sequence using well-known methods, e.g., signal peptides, extracellular domains, one or more transmembrane segments or loops, ligand binding regions, zinc finger domains, DNA binding domains, acylation sites, glycosylation sites, or phosphorylation sites.

[0151] Fragments can be discrete (not fused to other amino acids or polypeptides) or can be within a larger polypeptide. Further, several fragments can be comprised within a single larger polypeptide. In one embodiment a fragment designed for expression in a host can have heterologous pre- and pro-polypeptide regions fused to the amino terminus of the polypeptide fragment and an additional region fused to the carboxyl terminus of the fragment.

[0152] The invention thus provides chimeric or fusion polypeptides. These comprise a polypeptide of the invention operatively linked to a heterologous protein or polypeptide having an amino acid sequence not substantially homologous to the polypeptide.

[0153] “Operatively linked” indicates that the polypeptide and the heterologous protein are fused in-frame. The heterologous protein can be fused to the N-terminus or C-terminus of the polypeptide. In one embodiment the fusion polypeptide does not affect function of the polypeptide per se. For example, the fusion polypeptide can be a GST-fusion polypeptide in which the polypeptide sequences are fused to the C-terminus of the GST sequences. Other types of fusion polypeptides include, but are not limited to, enzymatic fusion polypeptides, for example beta-galactosidase fusions, yeast two-hybrid GAL fusions, poly-His fusions and Ig fusions. Such fusion polypeptides, particularly poly-His fusions, can facilitate the purification of recombinant polypeptide. In certain host cells (e.g., mammalian host cells), expression and/or secretion of a polypeptide can be increased using a heterologous signal sequence. Therefore, in another embodiment, the fusion polypeptide contains a heterologous signal sequence at its N-terminus.

[0154] EP-A-O 464 533 discloses fusion proteins comprising various portions of immunoglobulin constant regions. The Fc is useful in therapy and diagnosis and thus results, for example, in improved pharmacokinetic properties (EP-A 0232 262). In drug discovery, for example, human proteins have been fused with Fc portions for the purpose of high-throughput screening assays to identify antagonists. Bennett et al., Journal of Molecular Recognition, 8:52-58 (1995) and Johanson et al., The Journal of Biological Chemistry, 270, 16:9459-9471 (1995). Thus, this invention also encompasses soluble fusion polypeptides containing a polypeptide of the invention and various portions of the constant regions of heavy or light chains of immunoglobulins of various subclasses (IgG, IgM, IgA, IgE).

[0155] A chimeric or fusion polypeptide can be produced by standard recombinant DNA techniques. For example, DNA fragments coding for the different polypeptide sequences are ligated together in-frame in accordance with conventional techniques. In another embodiment, the fusion gene can be synthesized by conventional techniques including automated DNA synthesizers. Alternatively, PCR amplification of nucleic acid fragments can be carried out using anchor primers which give rise to complementary overhangs between two consecutive nucleic acid fragments which can subsequently be annealed and re-amplified to generate a chimeric nucleic acid sequence (see Ausubel et al., Current Protocols in Molecular Biology, 1992).

[0156] Moreover, many expression vectors are commercially available that already encode a fusion moiety (e.g., a GST protein). A nucleic acid molecule encoding a polypeptide of the invention can be cloned into such an expression vector such that the fusion moiety is linked in-frame to the polypeptide.

[0157] The isolated polypeptide can be purified from cells that naturally express it, can be purified from cells that have been altered to express it (recombinant), or synthesized using known protein synthesis methods. In one embodiment, the polypeptide is produced by recombinant DNA techniques. For example, a nucleic acid molecule encoding the polypeptide is cloned into an expression vector, the expression vector introduced into a host cell and the polypeptide expressed in the host cell. The polypeptide can then be isolated from the cells by an appropriate purification scheme using standard protein purification techniques.

[0158] The polypeptides of the present invention can be used to raise antibodies or to elicit an immune response. The polypeptides can also be used as a reagent, e.g., a labeled reagent, in assays to quantitatively determine levels of the polypeptide or a molecule to which it binds (e.g., a ligand) in biological fluids. The polypeptides can also be used as markers for cells or tissues in which the corresponding polypeptide is preferentially expressed, either constitutively, during tissue differentiation, or in a diseased state. The polypeptides can be used to isolate a corresponding binding agent, e.g., ligand or receptor, such as, for example, in an interaction trap assay, and to screen for peptide or small molecule antagonists or agonists of the binding interaction.

Antibodies of the Invention

[0159] Polyclonal antibodies and/or monoclonal antibodies that specifically bind one form of the gene product but not to the other form of the gene product are also provided. Antibodies are also provided which bind a portion of either the variant or the reference gene product that contains the polymorphic site or sites. The term “antibody” as used herein refers to immunoglobulin molecules and immunologically active portions of immunoglobulin molecules, i.e., molecules that contain an antigen binding site that specifically bind an antigen. A molecule that specifically binds to a polypeptide of the invention is a molecule that binds to that polypeptide or a fragment thereof, but does not substantially bind other molecules in a sample, e.g., a biological sample, which naturally contains the polypeptide. Examples of immunologically active portions of immunoglobulin molecules include F(ab) and F(ab′)₂ fragments which can be generated by treating the antibody with an enzyme such as pepsin. The invention provides polyclonal and monoclonal antibodies that bind to a polypeptide of the invention. The term “monoclonal antibody” or “monoclonal antibody composition”, as used herein, refers to a population of antibody molecules that contain only one species of an antigen binding site capable of immunoreacting with a particular epitope of a polypeptide of the invention. A monoclonal antibody composition thus typically displays a single binding affinity for a particular polypeptide of the invention with which it immunoreacts.

[0160] Polyclonal antibodies can be prepared as described above by immunizing a suitable subject with a desired immunogen, e.g., polypeptide of the invention or a fragment thereof. The antibody titer in the immunized subject can be monitored over time by standard techniques, such as with an enzyme linked immunosorbent assay (ELISA) using immobilized polypeptide. If desired, the antibody molecules directed against the polypeptide can be isolated from the mammal (e.g., from the blood) and further purified by well-known techniques, such as protein A chromatography to obtain the IgG fraction. At an appropriate time after immunization, e.g., when the antibody titers are highest, antibody-producing cells can be obtained from the subject and used to prepare monoclonal antibodies by standard techniques, such as the hybridoma technique originally described by Kohler and Milstein, Nature 256:495-497 (1975), the human B cell hybridoma technique (Kozbor et al., Immunol. Today 4: 72 (1983)), the EBV-hybridoma technique (Cole et al, Monoclonal Antibodies and Cancer Therapy, Alan R. Liss, 1985, Inc., pp. 77-96) or trioma techniques. The technology for producing hybridomas is well known (see generally Current Protocols in Immunology (1994) Coligan et al., (eds.) John Wiley & Sons, Inc., New York, N.Y.). Briefly, an immortal cell line (typically a myeloma) is fused to lymphocytes (typically splenocytes) from a mammal immunized with an immunogen as described above, and the culture supernatants of the resulting hybridoma cells are screened to identify a hybridoma producing a monoclonal antibody that binds a polypeptide of the invention.

[0161] Any of the many well known protocols used for fusing lymphocytes and immortalized cell lines can be applied for the purpose of generating a monoclonal antibody to a polypeptide of the invention (see, e.g., Current Protocols in Immunology, supra; Galfre et al., Nature 266:55052 (1977); R. H. Kenneth, in Monoclonal Antibodies: A New Dimension In Biological Analyses, Plenum Publishing Corp., New York, N.Y. (1980); and Lerner, Yale J. Biol. Med. 54:387-402 (1981)). Moreover, the ordinarily skilled worker will appreciate that there are many variations of such methods that also would be useful.

[0162] Alternative to preparing monoclonal antibody-secreting hybridomas, a monoclonal antibody to a polypeptide of the invention can be identified and isolated by screening a recombinant combinatorial immunoglobulin library (e.g., an antibody phage display library) with the polypeptide to thereby isolate immunoglobulin library members that bind the polypeptide. Kits for generating and screening phage display libraries are commercially available (e.g., the Pharmacia Recombinant Phage Antibody System, Catalog NO: 27-9400-01; and the Stratagene SurfZAP™ Phage Display Kit, Catalog NO: 240612). Additionally, examples of methods and reagents particularly amenable for use in generating and screening antibody display library can be found in, for example, U.S. Pat. No. 5,223,409; PCT Publication NO: WO 92/18619; PCT Publication NO: WO 91/17271; PCT Publication NO: WO 92/20791; PCT Publication NO: WO 92/15679; PCT Publication NO: WO 93/01288; PCT Publication NO: WO 92/01047; PCT Publication NO: WO 92/09690; PCT Publication NO: WO 90/02809; Fuchs et al., Bio/Technology 9: 1370-1372 (1991); Hay et al., Hum. Antibod. Hybridomas 3:81-85 (1992); Huse et al., Science 246: 1275-1281 (1989); and Griffiths et al., EMBO J. 12:725-734 (1993).

[0163] Additionally, recombinant antibodies, such as chimeric and humanized monoclonal antibodies, comprising both human and non-human portions, which can be made using standard recombinant DNA techniques, are within the scope of the invention. Such chimeric and humanized monoclonal antibodies can be produced by recombinant DNA techniques known in the art.

[0164] In general, antibodies of the invention (e.g., a monoclonal antibody) can be used to isolate a polypeptide of the invention by standard techniques, such as affinity chromatography or immunoprecipitation. A polypeptide-specific antibody can facilitate the purification of natural polypeptide from cells and of recombinantly produced polypeptide expressed in host cells. Moreover, an antibody specific for a polypeptide of the invention can be used to detect the polypeptide (e.g., in a cellular lysate, cell supernatant, or tissue sample) in order to evaluate the abundance and pattern of expression of the polypeptide. Antibodies can be used diagnostically to monitor protein levels in tissue as part of a clinical testing procedure, e.g., to, for example, determine the efficacy of a given treatment regimen. The antibody can be coupled to a detectable substance to facilitate its detection. Examples of detectable substances include various enzymes, prosthetic groups, fluorescent materials, luminescent materials, bioluminescent materials, and radioactive materials. Examples of suitable enzymes include horseradish peroxidase, alkaline phosphatase, beta-galactosidase, or acetylcholinesterase; examples of suitable prosthetic group complexes include streptavidin/biotin and avidin/biotin; examples of suitable fluorescent materials include umbelliferone, fluorescein, fluorescein isothiocyanate, rhodamine, dichlorotriazinylamine fluorescein, dansyl chloride or phycoerythrin; an example of a luminescent material includes luminol; examples of bioluminescent materials include luciferase, luciferin, and aequorin, and examples of suitable radioactive material include ¹²⁵I, ¹³¹I, ³⁵S or ³H.

Diagnostic Assays

[0165] The nucleic acids, probes, primers, polypeptides and antibodies described herein can be used in methods of diagnosis of Type II diabetes; of a susceptibility to Type II diabetes; or of a condition associated with a KChIP1 gene, as well as in kits (e.g., useful for diagnosis of Type II diabetes; a susceptibility to Type II diabetes; or a condition associated with a KChIP1 gene). In one embodiment, the kit comprises primers which contain one or more of the SNP's identified in Table 10.

[0166] In one embodiment of the invention, diagnosis of a disease or condition associated with a KChIP1 gene (e.g., diagnosis of Type II diabetes, or of a susceptibility to Type II diabetes) is made by detecting a polymorphism in a KChIP1 nucleic acid as described herein. The polymorphism can be a change in a KChIP1 nucleic acid, such as the insertion or deletion of a single nucleotide, or of more than one nucleotide, resulting in a frame shift; the change of at least one nucleotide, resulting in a change in the encoded amino acid; the change of at least one nucleotide, resulting in the generation of a premature stop codon; the deletion of several nucleotides, resulting in a deletion of one or more amino acids encoded by the nucleotides; the insertion of one or several nucleotides, such as by unequal recombination or gene conversion, resulting in an interruption of the coding sequence of the gene; duplication of all or a part of the gene; transposition of all or a part of the gene; or rearrangement of all or a part of the gene. More than one such change may be present in a single gene. Such sequence changes cause a difference in the polypeptide encoded by a KChIP1 nucleic acid. For example, if the difference is a frame shift change, the frame shift can result in a change in the encoded amino acids, and/or can result in the generation of a premature stop codon, causing generation of a truncated polypeptide. Alternatively, a polymorphism associated with a disease or condition or a susceptibility to a disease or condition associated with a KChIP1 nucleic acid can be a synonymous alteration in one or more nucleotides (i.e., an alteration that does not result in a change in the polypeptide encoded by a KChIP1 nucleic acid). Such a polymorphism may alter splicing sites, affect the stability or transport of mRNA, or otherwise affect the transcription or translation of the gene. A KChIP1 nucleic acid that has any of the changes or alterations described above is referred to herein as an “altered nucleic acid.”

[0167] In a first method of diagnosing Type II diabetes or a susceptibility to Type II diabetes, or another disease or condition associated with a KChIP1 gene, hybridization methods, such as Southern analysis, Northern analysis, or in situ hybridizations, can be used (see Current Protocols in Molecular Biology, Ausubel, F. et al., eds, John Wiley & Sons, including all supplements through 1999). For example, a biological sample (a “test sample”) from a test subject (the “test individual”) of genomic DNA, RNA, or cDNA, is obtained from an individual, such as an individual suspected of having, being susceptible to or predisposed for, or carrying a defect for, the disease or condition, or the susceptibility to the disease or condition, associated with a KChIP1 gene (e.g., Type II diabetes). The individual can be an adult, child, or fetus. The test sample can be from any source which contains genomic DNA, such as a blood sample, sample of amniotic fluid, sample of cerebrospinal fluid, or tissue sample from skin, muscle, buccal or conjunctival mucosa, placenta, gastrointestinal tract or other organs. A test sample of DNA from fetal cells or tissue can be obtained by appropriate methods, such as by amniocentesis or chorionic villus sampling. The DNA, RNA, or cDNA sample is then examined to determine whether a polymorphism in a KChIP1 nucleic acid is present, and/or to determine which splicing variant(s) encoded by the KChIP1 is present. The presence of the polymorphism or splicing variant(s) can be indicated by hybridization of the gene in the genomic DNA, RNA, or cDNA to a nucleic acid probe. A “nucleic acid probe”, as used herein, can be a DNA probe or an RNA probe; the nucleic acid probe can contain, for example, at least one polymorphism in a KChIP1 nucleic acid (e.g., as set forth in Table 10) and/or contain a nucleic acid encoding a particular splicing variant of a KChIP1 nucleic acid. The probe can be any of the nucleic acid molecules described above (e.g., the gene or nucleic acid, a fragment, a vector comprising the gene or nucleic acid, a probe or primer, etc.).

[0168] To diagnose Type II diabetes, or a susceptibility to Type II diabetes, or another condition associated with a KChIP1 gene, a hybridization sample is formed by contacting the test sample containing a KChIP1 nucleic acid with at least one nucleic acid probe. A preferred probe for detecting mRNA or genomic DNA is a labeled nucleic acid probe capable of hybridizing to mRNA or genomic DNA sequences described herein. The nucleic acid probe can be, for example, a full-length nucleic acid molecule, or a portion thereof, such as an oligonucleotide of at least 15, 30, 50, 100, 250 or 500 nucleotides in length and sufficient to specifically hybridize under stringent conditions to appropriate mRNA or genomic DNA. For example, the nucleic acid probe can be all or a portion of one of SEQ ID NOs: 114-258 or the complement thereof, or a portion thereof. Other suitable probes for use in the diagnostic assays of the invention are described above (see e.g., probes and primers discussed under the heading, “Nucleic Acids of the Invention”).

[0169] The hybridization sample is maintained under conditions that are sufficient to allow specific hybridization of the nucleic acid probe to a KChIP1 nucleic acid. “Specific hybridization”, as used herein, indicates exact hybridization (e.g., with no mismatches). Specific hybridization can be performed under high stringency conditions or moderate stringency conditions, for example, as described above. In a particularly preferred embodiment, the hybridization conditions for specific hybridization are high stringency.

[0170] Specific hybridization, if present, is then detected using standard methods. If specific hybridization occurs between the nucleic acid probe and KChIP1 nucleic acid in the test sample, then the KChIP1 has the polymorphism, or is the splicing variant, that is present in the nucleic acid probe. More than one nucleic acid probe can also be used concurrently in this method. Specific hybridization of any one of the nucleic acid probes is indicative of a polymorphism in the KChIP1 nucleic acid, or of the presence of a particular splicing variant encoding the KChIP1 nucleic acid and is therefore diagnostic for a susceptibility to a disease or condition associated with a KChIP1 nucleic acid (e.g., Type II diabetes).

[0171] In Northern analysis (see Current Protocols in Molecular Biology, Ausubel, F. et al, eds., John Wiley & Sons, supra) the hybridization methods described above are used to identify the presence of a polymorphism or a particular splicing variant, associated with a susceptibility to a disease or condition associated with a KChIP1 gene (e.g., Type II diabetes). For Northern analysis, a test sample of RNA is obtained from the individual by appropriate means. Specific hybridization of a nucleic acid probe, as described above, to RNA from the individual is indicative of a polymorphism in a KChIP1 nucleic acid, or of the presence of a particular splicing variant encoded by a KChIP1 nucleic acid and is therefore diagnostic for Type II diabetes or a susceptibility to Type II diabetes or a condition associated with a KChIP1 nucleic acid (e.g., Type II diabetes).

[0172] For representative examples of use of nucleic acid probes, see, for example, U.S. Pat. Nos. 5,288,611 and 4,851,330.

[0173] Alternatively, a peptide nucleic acid (PNA) probe can be used instead of a nucleic acid probe in the hybridization methods described above. PNA is a DNA mimic having a peptide-like, inorganic backbone, such as N-(2-aminoethyl)glycine units, with an organic base (A, G, C, T or U) attached to the glycine nitrogen via a methylene carbonyl linker (see, for example, Nielsen, P. E. et al., Bioconjugate Chemistry 5, American Chemical Society, p. 1 (1994). The PNA probe can be designed to specifically hybridize to a gene having a polymorphism associated with a susceptibility to a disease or condition associated with a KChIP1 nucleic acid (e.g., Type II diabetes). Hybridization of the PNA probe to a KChIP1 gene is diagnostic for Type II diabetes or a susceptibility to Type II diabetes or a condition associated with a KChIP1 nucleic acid.

[0174] In another method of the invention, alteration analysis by restriction digestion can be used to detect an altered gene, or genes containing a polymorphism(s), if the alteration (mutation) or polymorphism in the gene results in the creation or elimination of a restriction site. A test sample containing genomic DNA is obtained from the individual. Polymerase chain reaction (PCR) can be used to amplify a KChIP1 nucleic acid (and, if necessary, the flanking sequences) in the test sample of genomic DNA from the test individual. RFLP analysis is conducted as described (see Current Protocols in Molecular Biology, supra). The digestion pattern of the relevant DNA fragment indicates the presence or absence of the alteration or polymorphism in the KChIP1 nucleic acid, and therefore indicates the presence or absence of Type II diabetes or the susceptibility to a disease or condition associated with a KChIP1 nucleic acid.

[0175] Sequence analysis can also be used to detect specific polymorphisms in a KChIP1 nucleic acid. A test sample of DNA or RNA is obtained from the test individual. PCR or other appropriate methods can be used to amplify the gene or nucleic acid, and/or its flanking sequences, if desired. The sequence of a KChIP1 nucleic acid, or a fragment of the nucleic acid, or cDNA, or fragment of the cDNA, or mRNA, or fragment of the mRNA, is determined, using standard methods. The sequence of the nucleic acid, nucleic acid fragment, cDNA, cDNA fragment, mRNA, or mRNA fragment is compared with the known nucleic acid sequence of the gene or cDNA (e.g., one or more of SEQ ID NOs: 114-258 or a complement thereof) or mRNA, as appropriate. The presence of a polymorphism in the KChIP1 indicates that the individual has Type II diabetes or a susceptibility to Type II diabetes.

[0176] Allele-specific oligonucleotides can also be used to detect the presence of a polymorphism in a KChIP1 nucleic acid, through the use of dot-blot hybridization of amplified oligonucleotides with allele-specific oligonucleotide (ASO) probes (see, for example, Saiki, R. et al., Nature 324:163-166 (1986)). An “allele-specific oligonucleotide” (also referred to herein as an “allele-specific oligonucleotide probe”) is an oligonucleotide of approximately 10-50 base pairs, preferably approximately 15-30 base pairs, that specifically hybridizes to a KChIP1 nucleic acid, and that contains a polymorphism associated with a susceptibility to a disease or condition associated with a KChIP1 nucleic acid. An allele-specific oligonucleotide probe that is specific for particular polymorphisms in a KChIP1 nucleic acid can be prepared, using standard methods (see Current Protocols in Molecular Biology, supra). To identify polymorphisms in the gene that are associated with a disease or condition associated with a KChIP1 nucleic acid or a susceptibility to a disease or condition associated with a KChIP1 nucleic acid a test sample of DNA is obtained from the individual. PCR can be used to amplify all or a fragment of a KChIP1 nucleic acid and its flanking sequences. The DNA containing the amplified KChIP1 nucleic acid (or fragment of the gene or nucleic acid) is dot-blotted, using standard methods (see Current Protocols in Molecular Biology, supra), and the blot is contacted with the oligonucleotide probe. The presence of specific hybridization of the probe to the amplified KChIP1 nucleic acid is then detected. Hybridization of an allele-specific oligonucleotide probe to DNA from the individual is indicative of a polymorphism in the KChIP1 nucleic acid, and is therefore indicative of a disease or condition associated with a KChIP1 nucleic acid or susceptibility to a disease or condition associated with a KChIP1 nucleic acid (e.g., Type II diabetes).

[0177] The invention further provides allele-specific oligonucleotides that hybridize to the reference or variant allele of a gene or nucleic acid comprising a single nucleotide polymorphism or to the complement thereof. These oligonucleotides can be probes or primers.

[0178] An allele-specific primer hybridizes to a site on target DNA overlapping a polymorphism and only primes amplification of an allelic form to which the primer exhibits perfect complementarity. See Gibbs, Nucleic Acid Res. 17, 2427-2448 (1989). This primer is used in conjunction with a second primer, which hybridizes at a distal site. Amplification proceeds from the two primers, resulting in a detectable product, which indicates the particular allelic form is present. A control is usually performed with a second pair of primers, one of which shows a single base mismatch at the polymorphic site and the other of which exhibits perfect complementarity to a distal site. The single-base mismatch prevents amplification and no detectable product is formed. The method works best when the mismatch is included in the 3′-most position of the oligonucleotide aligned with the polymorphism because this position is most destabilizing to elongation from the primer (see, e.g., WO 93/22456).

[0179] With the addition of such analogs as locked nucleic acids (LNAs), the size of primers and probes can be reduced to as few as 8 bases. LNAs are a novel class of bicyclic DNA analogs in which the 2′ and 4′ positions in the furanose ring are joined via an O-methylene (oxy-LNA), S-methylene (thio-LNA), or amino methylene (amino-LNA) moiety. Common to all of these LNA variants is an affinity toward complementary nucleic acids, which is by far the highest reported for a DNA analog. For example, particular all oxy-LNA nonamers have been shown to have melting temperatures of 64° C. and 74° C. when in complex with complementary DNA or RNA, respectively, as oposed to 28° C. for both DNA and RNA for the corresponding DNA nonamer. Substantial increases in Tₘ are also obtained when LNA monomers are used in combination with standard DNA or RNA monomers. For primers and probes, depending on where the LNA monomers are included (e.g., the 3′ end, the 5′end, or in the middle), the Tₘ could be increased considerably.

[0180] In another embodiment, arrays of oligonucleotide probes that are complementary to target nucleic acid sequence segments from an individual, can be used to identify polymorphisms in a KChIP1 nucleic acid. For example, in one embodiment, an oligonucleotide array can be used. Oligonucleotide arrays typically comprise a plurality of different oligonucleotide probes that are coupled to a surface of a substrate in different known locations. These oligonucleotide arrays, also described as “Genechips™,” have been generally described in the art, for example, U.S. Pat. No. 5,143,854 and PCT patent publication Nos. WO 90/15070 and 92/10092. These arrays can generally be produced using mechanical synthesis methods or light directed synthesis methods that incorporate a combination of photolithographic methods and solid phase oligonucleotide synthesis methods. See Fodor et al., Science 251:767-777 (1991), Pirrung et al., U.S. Pat. No. 5,143,854 (see also PCT Application NO: WO 90/15070) and Fodor et al., PCT Publication NO: WO 92/10092 and U.S. Pat. No. 5,424,186, the entire teachings of each of which are incorporated by reference herein. Techniques for the synthesis of these arrays using mechanical synthesis methods are described in, e.g., U.S. Pat. No. 5,384,261; the entire teachings of which are incorporated by reference herein. In another example, linear arrays can be utilized.

[0181] Once an oligonucleotide array is prepared, a nucleic acid of interest is hybridized with the array and scanned for polymorphisms. Hybridization and scanning are generally carried out by methods described herein and also in, e.g., published PCT Application Nos. WO 92/10092 and WO 95/11995, and U.S. Pat. No. 5,424,186, the entire teachings of which are incorporated by reference herein. In brief, a target nucleic acid sequence that includes one or more previously identified polymorphic markers is amplified by well-known amplification techniques, e.g., PCR. Typically, this involves the use of primer sequences that are complementary to the two strands of the target sequence both upstream and downstream from the polymorphism. Asymmetric PCR techniques may also be used. Amplified target, generally incorporating a label, is then hybridized with the array under appropriate conditions. Upon completion of hybridization and washing of the array, the array is scanned to determine the position on the array to which the target sequence hybridizes. The hybridization data obtained from the scan is typically in the form of fluorescence intensities as a function of location on the array.

[0182] Although primarily described in terms of a single detection block, e.g., for detection of a single polymorphism, arrays can include multiple detection blocks, and thus be capable of analyzing multiple, specific polymorphisms. In alternative arrangements, it will generally be understood that detection blocks may be grouped within a single array or in multiple, separate arrays so that varying, optimal conditions may be used during the hybridization of the target to the array. For example, it may often be desirable to provide for the detection of those polymorphisms that fall within G-C rich stretches of a genomic sequence, separately from those falling in A-T rich segments. This allows for the separate optimization of hybridization conditions for each situation.

[0183] Additional uses of oligonucleotide arrays for polymorphism detection can be found, for example, in U.S. Pat. Nos. 5,858,659 and 5,837,832, the entire teachings of which are incorporated by reference herein. Other methods of nucleic acid analysis can be used to detect polymorphisms in a Type II diabetes gene or variants encoding by a Type II diabetes gene. Representative methods include direct manual sequencing (Church and Gilbert, Proc. Natl. Acad. Sci. USA 81:1991-1995 (1988); Sanger, F. et al., Proc. Natl. Acad. Sci. USA 74:5463-5467 (1977); Beavis et al., U.S. Pat. No. 5,288,644); automated fluorescent sequencing; single-stranded conformation polymorphism assays (SSCP); clamped denaturing gel electrophoresis (CDGE); denaturing gradient gel electrophoresis (DGGE) (Sheffield, V. C. et al., Proc. Natl. Acad. Sci. USA 86:232-236 (1989)), mobility shift analysis (Orita, M. et al., Proc. Natl. Acad. Sci. USA 86:2766-2770 (1989)), restriction enzyme analysis (Flavell et al., Cell 15:25 (1978); Geever, et al., Proc. Natl. Acad. Sci. USA 78:5081 (1981)); heteroduplex analysis; chemical mismatch cleavage (CMC) (Cotton et al., Proc. Natl. Acad. Sci. USA 85:4397-4401 (1985)); RNase protection assays (Myers, R. M. et al., Science 230:1242 (1985)); use of polypeptides which recognize nucleotide mismatches, such as E. coli mutS protein; allele-specific PCR, for example.

[0184] In one embodiment of the invention, diagnosis of a disease or condition associated with a KChIP1 nucleic acid (e.g., Type II diabetes) or a susceptibility to a disease or condition associated with a KChIP1 nucleic acid (e.g., Type II diabetes) can also be made by expression analysis by quantitative PCR (kinetic thermal cycling). This technique, utilizing TaqMan®, can be used to allow the identification of polymorphisms and whether a patient is homozygous or heterozygous. The technique can assess the presence of an alteration in the expression or composition of the polypeptide encoded by a KChIP1 nucleic acid or splicing variants encoded by a KChIP1 nucleic acid. Further, the expression of the variants can be quantified as physically or functionally different.

[0185] In another embodiment of the invention, diagnosis of Type II diabetes or a susceptibility to Type II diabetes 9 or a condition associated with a KChIP1 gene) can be made by examining expression and/or composition of a KChIP1 polypeptide, by a variety of methods, including enzyme linked immunosorbent assays (ELISAs), Western blots, immunoprecipitations and immunofluorescence. A test sample from an individual is assessed for the presence of an alteration in the expression and/or an alteration in composition of the polypeptide encoded by a KChIP1 nucleic acid, or for the presence of a particular variant encoded by a KChIP1 nucleic acid. An alteration in expression of a polypeptide encoded by a KChIP1 nucleic acid can be, for example, an alteration in the quantitative polypeptide expression (i.e., the amount of polypeptide produced); an alteration in the composition of a polypeptide encoded by a KChIP1 nucleic acid is an alteration in the qualitative polypeptide expression (e.g., expression of an altered KChIP1 polypeptide or of a different splicing variant). In a preferred embodiment, diagnosis of the disease or condition associated with KChIP1 nucleic acid or a susceptibility to a disease or condition associated with a KChIP1 nucleic acid is made by detecting a particular splicing variant encoded by that KChIP1 nucleic acid, or a particular pattern of splicing variants.

[0186] Both such alterations (quantitative and qualitative) can also be present. The term “alteration” in the polypeptide expression or composition, as used herein, refers to an alteration in expression or composition in a test sample, as compared with the expression or composition of polypeptide by a KChIP1 nucleic acid in a control sample. A control sample is a sample that corresponds to the test sample (e.g., is from the same type of cells), and is from an individual who is not affected by a susceptibility to a disease or condition associated with a KChIP1 nucleic acid. An alteration in the expression or composition of the polypeptide in the test sample, as compared with the control sample, is indicative of a susceptibility to a disease or condition associated with a KChIP1 nucleic acid. Similarly, the presence of one or more different splicing variants in the test sample, or the presence of significantly different amounts of different splicing variants in the test sample, as compared with the control sample, is indicative of a disease or condition associated with a KChIP1 nucleic acid or a susceptibility to a disease or condition associated with a KChIP1 nucleic acid. Various means of examining expression or composition of the polypeptide encoded by a KChIP1 nucleic acid can be used, including: spectroscopy, colorimetry, lectrophoresis, isoelectric focusing, and immunoassays (e.g., David et al., U.S. Pat. No. 4,376,110) such as immunoblotting (see also Current Protocols in Molecular Biology, particularly Chapter 10). For example, in one embodiment, an antibody capable of binding to the polypeptide (e.g., as described above), preferably an antibody with a detectable label, can be used. Antibodies can be polyclonal, or more preferably, monoclonal. An intact antibody, or a fragment thereof (e.g., Fab or F(ab′)₂) can be used. The term “labeled”, with regard to the probe or antibody, is intended to encompass direct labeling of the probe or antibody by coupling (i.e., physically linking) a detectable substance to the probe or antibody, as well as indirect labeling of the probe or antibody by reactivity with another reagent that is directly labeled. Examples of indirect labeling include detection of a primary antibody using a fluorescently labeled secondary antibody and end-labeling of a DNA probe with biotin such that it can be detected with fluorescently labeled streptavidin.

[0187] Western blotting analysis, using an antibody as described above that specifically binds to a polypeptide encoded by an altered KChIP1 nucleic acid (e.g., a KChIP1 nucleic acid having one or more alterations as shown in Table 10), or an antibody that specifically binds to a polypeptide encoded by a non-altered nucleic acid, or an antibody that specifically binds to a particular splicing variant encoded by a nucleic acid, can be used to identify the presence in a test sample of a particular splicing variant or of a polypeptide encoded by a polymorphic or altered KChIP1 nucleic acid, or the absence in a test sample of a particular splicing variant or of a polypeptide encoded by a non-polymorphic or non-altered nucleic acid. The presence of a polypeptide encoded by a polymorphic or altered nucleic acid, or the absence of a polypeptide encoded by a non-polymorphic or non-altered nucleic acid, is diagnostic for a disease or condition associated with a KChIP1 nucleic acid or a susceptibility to a disease or condition associated with a KChIP1 nucleic acid (e.g., Type II diabetes), as is the presence (or absence) of particular splicing variants encoded by the KChIP1 nucleic acid.

[0188] In one embodiment of this method, the level or amount of polypeptide encoded by a KChIP1 nucleic acid in a test sample is compared with the level or amount of the polypeptide encoded by the KChIP1 in a control sample. A level or amount of the polypeptide in the test sample that is higher or lower than the level or amount of the polypeptide in the control sample, such that the difference is statistically significant, is indicative of an alteration in the expression of the polypeptide encoded by the KChIP1 nucleic acid, and is diagnostic for a disease or condition associated with a KChIP1 nucleic acid or a susceptibility to a disease or condition associated with that KChIP1 nucleic acid (e.g., Type II diabetes). Alternatively, the composition of the polypeptide encoded by a KChIP1 nucleic acid in a test sample is compared with the composition of the polypeptide encoded by the KChIP1 nucleic acid in a control sample (e.g., the presence of different splicing variants). A difference in the composition of the polypeptide in the test sample, as compared with the composition of the polypeptide in the control sample, is diagnostic for a disease or condition associated with a KChIP1 nucleic acid or a susceptibility to a disease or condition associated with that KChIP1 nucleic acid (e.g., Type II diabetes). In another embodiment, both the level or amount and the composition of the polypeptide can be assessed in the test sample and in the control sample. A difference in the amount or level of the polypeptide in the test sample, compared to the control sample; a difference in composition in the test sample, compared to the control sample; or both a difference in the amount or level, and a difference in the composition, is indicative of a disease or condition associated with a KChIP1 nucleic acid or a susceptibility to a disease or condition associated with that KChIP1 nucleic acid.

[0189] The invention further pertains to a method for the diagnosis or identification of a susceptibility to Type II diabetes in an individual, by identifying an at-risk haplotype (e.g., a haplotype comprising a KChIP1 nucleic acid). The KChIP1-associated haplotypes, e.g., those described in Table 2, Table 4, Table 5, Table 14, Table 16, Table 17 and Table 18, describe a set of genetic markers (“alleles”). In a certain embodiment, the haplotype can comprise one or more alleles, two or more alleles, three or more alleles, four or more alleles, or five or more alleles. The genetic markers are particular “alleles” at “polymorphic sites” associated with KChIP1. A nucleotide position at which more than one sequence is possible in a population (either a natural population or a synthetic population, e.g., a library of synthetic molecules), is referred to herein as a “polymorphic site”. Where a polymorphic site is a single nucleotide in length, the site is referred to as a single nucleotide polymorphism (“SNP”). For example, if at a particular chromosomal location, one member of a population has an adenine and another member of the population has a thymine at the same position, then this position is a polymorphic site, and, more specifically, the polymorphic site is a SNP. Polymorphic sites can allow for differences in sequences based on substitutions, insertions or deletions. Each version of the sequence with respect to the polymorphic site is referred to herein as an “allele” of the polymorphic site. Thus, in the previous example, the SNP allows for both an adenine allele and a thymine allele.

[0190] Typically, a reference sequence is referred to for a particular sequence. Alleles that differ from the reference are referred to as “variant” alleles. For example, the reference KChIP1 sequence is described herein by SEQ ID NO: 1. The term, “variant KChIP1”, as used herein, refers to a sequence that differs from SEQ ID NO: 1, but is otherwise substantially similar. The genetic markers that make up the haplotypes described herein are KChIP1 variants. The variants of KChIP1 that are used to determine the haplotypes disclosed herein of the present invention are associated with Type II diabetes or a susceptibility to Type II diabetes.

[0191] Additional variants can include changes that affect a polypeptide, e.g., the KChIP1 polypeptide. These sequence differences, when compared to a reference nucleotide sequence, can include the insertion or deletion of a single nucleotide, or of more than one nucleotide, resulting in a frame shift; the change of at least one nucleotide, resulting in a change in the encoded amino acid; the change of at least one nucleotide, resulting in the generation of a premature stop codon; the deletion of several nucleotides, resulting in a deletion of one or more amino acids encoded by the nucleotides; the insertion of one or several nucleotides, such as by unequal recombination or gene conversion, resulting in an interruption of the coding sequence of a reading frame; duplication of all or a part of a sequence; transposition; or a rearrangement of a nucleotide sequence, as described in detail above. Such sequence changes alter the polypeptide encoded by a KChIP1 nucleic acid. For example, if the change in the nucleic acid sequence causes a frame shift, the frame shift can result in a change in the encoded amino acids, and/or can result in the generation of a premature stop codon, causing generation of a truncated polypeptide. Alternatively, a polymorphism associated with Type II diabetes or a susceptibility to Type II diabetes can be a synonymous change in one or more nucleotides (i.e., a change that does not result in a change in the amino acid sequence). Such a polymorphism can, for example, alter splice sites, affect the stability or transport of mRNA, or otherwise affect the transcription or translation of the polypeptide. The polypeptide encoded by the reference nucleotide sequence is the “reference” polypeptide with a particular reference amino acid sequence, and polypeptides encoded by variant alleles are referred to as “variant” polypeptides with variant amino acid sequences.

[0192] Haplotypes are a combination of genetic markers, e.g., particular alleles at polymorphic sites. The haplotypes described herein, e.g., having markers such as those shown in Table 10, Table 11, Table 12, Table 13, Table 14, Table 16, Table 17 and Table 18, are found more frequently in individuals with Type II diabetes than in individuals without Type II diabetes. Therefore, these haplotypes have predictive value for detecting Type II diabetes or a susceptibility to Type II diabetes in an individual. The haplotypes described herein are a combination of various genetic markers, e.g., SNPs and microsatellites. Therefore, detecting haplotypes can be accomplished by methods known in the art for detecting sequences at polymorphic sites, such as the methods described above.

Haplotype Screening

[0193] In the methods for the diagnosis and identification of susceptibility to Type II diabetes or Type II diabetes in an individual, an at-risk haplotype is identified. In one embodiment, the at-risk haplotype is one which confers a significant risk of Type II diabetes. In one embodiment, significance associated with a haplotype is measured by an odds ratio. In a further embodiment, the significance is measured by a percentage. In one embodiment, a significant risk is measured as an odds ratio of at least about 1.2, including by not limited to: 1.2, 1.3, 1.4, 1.5, 1.6, 1.7, 1.8, and 1.9. In a further embodiment, an odds ratio of at least 1.2 is significant. In a further embodiment, an odds ratio of at least about 1.5 is significant. In a further embodiment, a significant increase in risk is at least about 1.7 is significant. In a further embodiment, a significant increase in risk is at least about 20%, including but not limited to about 25%, 30%, 35%, 40%, 45%, 50%, 55%, 60%, 65%, 70%, 75%, 80%, 85%, 90%, 95% and 98%. In a further embodiment, a significant increase in risk is at least about 50%. It is understood however, that identifying whether a risk is medically significant may also depend on a variety of factors, including the specific disease, the haplotype, and often, environmental factors.

[0194] The invention also pertains to methods of diagnosing Type II diabetes or a susceptibility to Type II diabetes in an individual, comprising screening for an at-risk haplotype in, or comprising portions of, the KChIP1 gene, where the haplotype is more frequently present in an individual susceptible to Type II diabetes (affected), compared to the frequency of its presence in a healthy individual (control), and wherein the presence of the haplotype is indicative of Type II diabetes or susceptibility to Type II diabetes. Standard techniques for genotyping for the presence of SNPs and/or microsatellite markers can be used, such as fluorescent based techniques (Chen, et al., Genome Res. 9, 492 (1999)), PCR, LCR, Nested PCR and other techniques for nucleic acid amplification. In a preferred embodiment, the method comprises assessing in an individual the presence or frequency of SNPs and/or microsatellites in, comprising portions of, the KChIP1 gene, wherein an excess or higher frequency of the SNPs and/or microsatellites compared to a healthy control individual is indicative that the individual has Type II diabetes or is susceptible to Type II diabetes. See, for example, Tables 6, 7, 9, 11, 13 and 14 (below) for SNPs and markers that can form haplotypes that can be used as screening tools. These markers and SNPs can be used to design diagnostic tests for determining Type II diabetes or a susceptibility to Type II diabetes. For example, an at-risk haplotype can include microsatellite markers and/or SNPs such as those set forth in Table 10, Table 11, Table 12 Table 13, Table 14, Table 16, Table 17, Table 18 Tables 20-24 and Table 26. The presence of the haplotype is diagnostic of Type II diabetes or of a susceptibility to Type II diabetes. Haplotype analysis involves defining a candidate susceptibility locus using LOD scores. The defined regions are then ultra-fine mapped with microsatellite markers with an average spacing between markers of less than 100 kb. All usable microsatellite markers that found in public databases and mapped within that region can be used. In addition, microsatellite markers identified within the deCODE genetics sequence assembly of the human genome can be used.

[0195] The frequencies of haplotypes in the patient and the control groups using an expectation-maximization algorithm can be estimated (Dempster A. et al., 1977. J. R. Stat. Soc. B, 39:1-389). An implementation of this algorithm that can handle missing genotypes and uncertainty with the phase can be used. Under the null hypothesis, the patients and the controls are assumed to have identical frequencies. Using a likelihood approach, an alternative hypothesis where a candidate at-risk-haplotype, which can include the markers described herein, is allowed to have a higher frequency in patients than controls, while the ratios of the frequencies of other haplotypes are assumed to be the same in both groups is tested. Likelihoods are maximized separately under both hypotheses and a corresponding 1-df likelihood ratio statistics is used to evaluate the statistic significance.

[0196] To look for at-risk-haplotypes in the 1-lod drop, for example, association of all possible combinations of genotyped markers is studied, provided those markers span a practical region. The combined patient and control groups can be randomly divided into two sets, equal in size to the original group of patients and controls. The haplotype analysis is then repeated and the most significant p-value registered is determined. This randomization scheme can be repeated, for example, over 100 times to construct an empirical distribution of p-values.

[0197] The at-risk haplotypes identified in Table 2 (haplotypes identified as A1, A2, A3, A4, A5, A6, B1, B2, B3, B4 and B5), Table 4 (haplotypes identified as D1 and D2), Table 5 (haplotypes identified as D2, D3, D4, D5 and D6) Table 14 (haplotypes identified as Hap S7 and S7′ (formerly Hap E and Hap E′), Table 16 (identified as F1, F2, G1 and G2), Table 17, Table 18 and Tables 20-24 are associated with Type II diabetes or a susceptibility to Type II diabetes. In certain embodiments, a haplotype associated with Type II diabetes or a susceptibility to Type II diabetes comprises markers DG5S879, DG5S881, D5S2075, DG5S883 and DG5S38 at the 5q35 locus; or DG5S1058 and DG5S37 at the 5q35 locus; or DG5S1058, DG5S37 and DG5S101 at the 5q35 locus; or DG5S881, DG5S1058, D5S2075, DG5S883 and DG5S38 at the 5q35 locus; or DG5S879, DG5S1058 and DG5S37; or DG5S881, D5S2075, DG5S883 and DG5S38 at the 5q35 locus; DG5S953, DG5S955, DG5S13 and DG5S959 at the 5q35 locus; or DG5S888 and DG5S953 at the 5q35 locus; or DG5S953, DG5S955 and DG5S124 at the 5q35 locus; or DG5S888, DG5S44 and DG5S953 at the 5q35 locus; or DG5S953, DG5S955, DG5S13, DG5S123, and DG5S959 at the 5q35 locus. The presence of the haplotype is diagnostic of Type II diabetes or of a susceptibility to Type II diabetes. Also described herein is a haplotype associated with Type II diabetes or a susceptibility to Type II diabetes comprising markers DG5S13, KCP_{—}1152, and D5S625 at the 5q35 locus; the presence of the haplotype is diagnostic of Type II diabetes or of a susceptibility to Type II diabetes. In one particular embodiment, the presence of the −4, 1, 0 haplotype at DG5S13, KCP_{—}1152, and D5S625 is diagnostic of Type II diabetes or of a susceptibility to Type II diabetes. In another embodiment, a haplotype associated with Type II diabetes or a susceptibility to Type II diabetes in an individual, comprises markers DG5S124, KCP_{—}1152, KCP_{—}2649, KPC_{—}4976 and KPC-16152 at the 5q35 locus. In one particular embodiment, the presence of the 0, 1, 1, 3 and 0 haplotype at DG5S124, KCP_{—}1152, KCP_{—}2649, KPC_{—}4976 and KPC-16152 is diagnostic of Type II diabetes or of a susceptibility to Type II diabetes. In another embodiment, a haplotype associated with Type II diabetes or a susceptibility to Type II diabetes in an individual, comprises markers KCP_{—}173982, KCP_{—}15400, and KCP_{—}18069. In one particular embodiment, the presence of the 0, 1, 1 haplotype at KCP_{—}173982, KCP_{—}15400, and KCP_{—}18069 is diagnostic of Type II diabetes or of a susceptibility to Type II diabetes.

[0198] In additional embodiments, a haplotype associated with Type II diabetes or a susceptibility to Type II diabetes comprises markers DG5S124, KCP_{—}1152, KCP_{—}2649, KCP_{—}4976, and KCP_{—}16152 at the 5q35 locus, as well as one of the following 3 markers: KCP_{—}197678, KCP_{—}197775, and KCP_{—}202795 at the 5q35 locus; the presence of the haplotype is diagnostic of Type II diabetes or of a susceptibility to Type II diabetes. In particular embodiments, the presence of the 0, 3, 1, 1, 3, 0 haplotype at DG5S124, KCP_{—}197678, KCP_{—}1152, KCP_{—}2649, KCP_{—}4976, and KCP_{—}16152; the presence of the 0, 3, 1, 1, 3, 0 haplotype at DG5S124, KCP_{—}197775, KCP_{—}1152, KCP_{—}2649, KCP_{—}4976, and KCP_{—}16152; or the presence of the 0, 1, 1, 1, 3, 0 haplotype at DG5S 124, KCP_{—}202795, KCP_{—}1152, KCP_{—}2649, KCP_{—}4976, and KCP_{—}16152; is diagnostic of Type II diabetes or of a susceptibility to Type II diabetes.

[0199] In additional embodiments, a haplotype associated with Type II diabetes or a susceptibility to Type II diabetes comprises markers rs1032856, KCP_RS888934, KCP_{—}93545, KCP_{—}102882, 169234, KCP_{—}186048 and KCP_{—}16152, as well as markers rs1032856, KCP_RS888934, KCP_{—}93545, KCP_{—}102882, 169234, KCP_{—}186048, KCP_{—}197775 and KCP_{—}16152 at the 5q35 locus; the presence of the haplotype is diagnostic of Type II diabetes or of a susceptibility to Type II diabetes. In particular embodiments, the presence of the G, G, T, C, G, G, A haplotype at rs1032856, KCP_RS888934, KCP_{—}93545, KCP_{—}102882, 169234, KCP_{—}186048 and KCP_{—}16152, or the presence of the G, G, T, C, G, G, C, A haplotype at rs1032856, KCP_RS888934, KCP_{—}93545, KCP_{—}102882, 169234, KCP_{—}186048, KCP_{—}197775 and KCP_{—}16152 is diagnostic of Type II diabetes or of a susceptibility to Type II diabetes.

[0200] Kits (e.g., reagent kits) useful in the methods of diagnosis comprise components useful in any of the methods described herein, including for example, hybridization probes or primers as described herein (e.g., labeled probes or primers), reagents for detection of labeled molecules, restriction enzymes (e.g., for RFLP analysis), allele-specific oligonucleotides, antibodies which bind to altered or to non-altered (native) KChIP1 polypeptide, means for amplification of nucleic acids comprising a KChIP1 nucleic acid, or means for analyzing the nucleic acid sequence of a KChIP1 nucleic acid or for analyzing the amino acid sequence of a KChIP1 polypeptide as described herein, etc. In one embodiment, the kit for diagnosing a Type II diabetes or a susceptibility to Type II diabetes can comprise primers for nucleic acid amplification of a region in the KChIP1 nucleic acid comprising an at-risk haplotype that is more frequently present in an individual having Type II diabetes or who is susceptible to Type II diabetes. The primers can be designed using portions of the nucleic acids flanking SNPs that are indicative of Type II diabetes. In a certain embodiment, the primers are designed to amplify regions of the KChIP1 gene associated with an at-risk haplotype for Type II diabetes, as shown in Table 10 and 13, or more particularly the haplotypes described in Tables 2, 4, 5, 14, 18 and 20-24.

Screening Assays and Agents Identified Thereby

[0201] The invention provides methods (also referred to herein as “screening assays”) for identifying the presence of a nucleotide that hybridizes to a nucleic acid of the invention, as well as for identifying the presence of a polypeptide encoded by a nucleic acid of the invention. In one embodiment, the presence (or absence) of a nucleic acid molecule of interest (e.g., a nucleic acid that has significant homology with a nucleic acid of the invention) in a sample can be assessed by contacting the sample with a nucleic acid comprising a nucleic acid of the invention (e.g., a nucleic acid having the sequence of one of SEQ ID NOs: 1, 114-258, or the complement thereof, or a nucleic acid encoding an amino acid having the sequence of one of SEQ ID NOs: 2, or a fragment or variant of such nucleic acids), under stringent conditions as described above, and then assessing the sample for the presence (or absence) of hybridization. In one embodiment, high stringency conditions are conditions appropriate for selective hybridization. In another embodiment, a sample containing the nucleic acid molecule of interest is contacted with a nucleic acid containing a contiguous nucleotide sequence (e.g., a primer or a probe as described above) that is at least partially complementary to a part of the nucleic acid molecule of interest (e.g., a KChIP1 nucleic acid), and the contacted sample is assessed for the presence or absence of hybridization. In another embodiment, the nucleic acid containing a contiguous nucleotide sequence is completely complementary to a part of the nucleic acid molecule of interest.

[0202] In any of these embodiments, all or a portion of the nucleic acid of interest can be subjected to amplification prior to performing the hybridization.

[0203] In another embodiment, the presence (or absence) of a polypeptide of interest, such as a polypeptide of the invention or a fragment or variant thereof, in a sample can be assessed by contacting the sample with an antibody that specifically hybridizes to the polypeptide of interest (e.g., an antibody such as those described above), and then assessing the sample for the presence (or absence) of binding of the antibody to the polypeptide of interest.

[0204] In another embodiment, the invention provides methods for identifying agents (e.g., fusion proteins, polypeptides, peptidomimetics, prodrugs, receptors, binding agents, antibodies, small molecules or other drugs, or ribozymes) which alter (e.g., increase or decrease) the activity of the polypeptides described herein, or which otherwise interact with the polypeptides herein. For example, such agents can be agents which bind to polypeptides described herein (e.g., KChIP1 binding agents); which have a stimulatory or inhibitory effect on, for example, activity of polypeptides of the invention; or which change (e.g., enhance or inhibit) the ability of the polypeptides of the invention to interact with KChIP1 binding agents (e.g., receptors or other binding agents); or which alter posttranslational processing of the KChIP1 polypeptide (e.g., agents that alter proteolytic processing to direct the polypeptide from where it is normally synthesized to another location in the cell, such as the cell surface; agents that alter proteolytic processing such that more polypeptide is released from the cell, etc.

[0205] In one embodiment, the invention provides assays for screening candidate or test agents that bind to or modulate the activity of polypeptides described herein (or biologically active portion(s) thereof), as well as agents identifiable by the assays. Test agents can be obtained using any of the numerous approaches in combinatorial library methods known in the art, including: biological libraries; spatially addressable parallel solid phase or solution phase libraries; synthetic library methods requiring deconvolution; the ‘one-bead one-compound’ library method; and synthetic library methods using affinity chromatography selection. The biological library approach is limited to polypeptide libraries, while the other four approaches are applicable to polypeptide, non-peptide oligomer or small molecule libraries of compounds (Lam, K. S., Anticancer Drug Des. 12:145 (1997)).

[0206] In one embodiment, to identify agents which alter the activity of a KChIP1 polypeptide, a cell, cell lysate, or solution containing or expressing a KChIP1 polypeptide, or another splicing variant encoded by a KChIP1 gene (such as comprising a SNP as shown in Table 10 and/or 3), or a fragment or derivative thereof (as described above), can be contacted with an agent to be tested; alternatively, the polypeptide can be contacted directly with the agent to be tested. The level (amount) of KChIP1 activity is assessed (e.g., the level (amount) of KChIP1 activity is measured, either directly or indirectly), and is compared with the level of activity in a control (i.e., the level of activity of the KChIP1 polypeptide or active fragment or derivative thereof in the absence of the agent to be tested). If the level of the activity in the presence of the agent differs, by an amount that is statistically significant, from the level of the activity in the absence of the agent, then the agent is an agent that alters the activity of a KChIP1 polypeptide. An increase in the level of KChIP1 activity relative to a control, indicates that the agent is an agent that enhances (is an agonist of) KChIP1 activity. Similarly, a decrease in the level of KChIP1 activity relative to a control, indicates that the agent is an agent that inhibits (is an antagonist of) KChIP1 activity. In another embodiment, the level of activity of a KChIP1 polypeptide or derivative or fragment thereof in the presence of the agent to be tested, is compared with a control level that has previously been established. A level of the activity in the presence of the agent that differs from the control level by an amount that is statistically significant indicates that the agent alters KChIP1 activity.

[0207] The present invention also relates to an assay for identifying agents which alter the expression of a KChIP1 nucleic acid (e.g., antisense nucleic acids, fusion proteins, polypeptides, peptidomimetics, prodrugs, receptors, binding agents, antibodies, small molecules or other drugs, or ribozymes) which alter (e.g., increase or decrease) expression (e.g., transcription or translation) of the gene or which otherwise interact with the nucleic acids described herein, as well as agents identifiable by the assays. For example, a solution containing a nucleic acid encoding a KChIP1 polypeptide (e.g., a KChIP1 gene or nucleic acid) can be contacted with an agent to be tested. The solution can comprise, for example, cells containing the nucleic acid or cell lysate containing the nucleic acid; alternatively, the solution can be another solution that comprises elements necessary for transcription/translation of the nucleic acid. Cells not suspended in solution can also be employed, if desired. The level and/or pattern of KChIP1 expression (e.g., the level and/or pattern of mRNA or of protein expressed, such as the level and/or pattern of different splicing variants) is assessed, and is compared with the level and/or pattern of expression in a control (i.e., the level and/or pattern of the KChIP1 expression in the absence of the agent to be tested). If the level and/or pattern in the presence of the agent differs, by an amount or in a manner that is statistically significant, from the level and/or pattern in the absence of the agent, then the agent is an agent that alters the expression of a Type II diabetes gene. Enhancement of KChIP1 expression indicates that the agent is an agonist of KChIP1 activity. Similarly, inhibition of KChIP1 expression indicates that the agent is an antagonist of KChIP1 activity. In another embodiment, the level and/or pattern of KChIP1 polypeptide(s) (e.g., different splicing variants) in the presence of the agent to be tested, is compared with a control level and/or pattern that have previously been established. A level and/or pattern in the presence of the agent that differs from the control level and/or pattern by an amount or in a manner that is statistically significant indicates that the agent alters KChIP1 expression.

[0208] In another embodiment of the invention, agents which alter the expression of a KChIP1 nucleic acid or which otherwise interact with the nucleic acids described herein, can be identified using a cell, cell lysate, or solution containing a nucleic acid encoding the promoter region of the KChIP1 gene or nucleic acid operably linked to a reporter gene. After contact with an agent to be tested, the level of expression of the reporter gene (e.g., the level of mRNA or of protein expressed) is assessed, and is compared with the level of expression in a control (i.e., the level of the expression of the reporter gene in the absence of the agent to be tested). If the level in the presence of the agent differs, by an amount or in a manner that is statistically significant, from the level in the absence of the agent, then the agent is an agent that alters the expression of the KChIP1, as indicated by its ability to alter expression of a gene that is operably linked to the KChIP1 gene promoter. Enhancement of the expression of the reporter indicates that the agent is an agonist of KChIP1 activity. Similarly, inhibition of the expression of the reporter indicates that the agent is an antagonist of KChIP1 activity. In another embodiment, the level of expression of the reporter in the presence of the agent to be tested is compared with a control level that has previously been established. A level in the presence of the agent that differs from the control level by an amount or in a manner that is statistically significant indicates that the agent alters expression.

[0209] Agents which alter the amounts of different splicing variants encoded by a KChIP1 nucleic acid (e.g., an agent which enhances activity of a first splicing variant, and which inhibits activity of a second splicing variant), as well as agents which are agonists of activity of a first splicing variant and antagonists of activity of a second splicing variant, can easily be identified using these methods described above.

[0210] In other embodiments of the invention, assays can be used to assess the impact of a test agent on the activity of a polypeptide in relation to a KChIP1 binding agent. For example, a cell that expresses a compound that interacts with a KChIP1 polypeptide (herein referred to as a “KChIP1 binding agent”, which can be a polypeptide or other molecule that interacts with a KChIP1 polypeptide, such as a receptor) is contacted with a KChIP1 in the presence of a test agent, and the ability of the test agent to alter the interaction between the KChIP1 and the KChIP1 binding agent is determined. Alternatively, a cell lysate or a solution containing the KChIP1 binding agent, can be used. An agent which binds to the KChIP1 or the KChIP1 binding agent can alter the interaction by interfering with, or enhancing the ability of the KChIP1 to bind to, associate with, or otherwise interact with the KChIP1 binding agent. Determining the ability of the test agent to bind to a KChIP1 nucleic acid or a KChIP1 binding agent can be accomplished, for example, by coupling the test agent with a radioisotope or enzymatic label such that binding of the test agent to the polypeptide can be determined by detecting the labeled with ¹²⁵I, ³⁵S, ¹⁴C or ³H, either directly or indirectly, and the radioisotope detected by direct counting of radioemmission or by scintillation counting. Alternatively, test agents can be enzymatically labeled with, for example, horseradish peroxidase, alkaline phosphatase, or luciferase, and the enzymatic label detected by determination of conversion of an appropriate substrate to product. It is also within the scope of this invention to determine the ability of a test agent to interact with the polypeptide without the labeling of any of the interactants. For example, a microphysiometer can be used to detect the interaction of a test agent with a KChIP1 polypeptide or a KChIP1 binding agent without the labeling of either the test agent, KChIP1 polypeptide, or the KChIP1 binding agent. McConnell, H. M. et al., Science 257:1906-1912 (1992). As used herein, a “microphysiometer” (e.g., Cytosensor™) is an analytical instrument that measures the rate at which a cell acidifies its environment using a light-addressable potentiometric sensor (LAPS). Changes in this acidification rate can be used as an indicator of the interaction between ligand and polypeptide.

[0211] Thus, these receptors can be used to screen for compounds that are agonists or antagonists, for use in treating a susceptibility to a disease or condition associated with a KChIP1 gene or nucleic acid, or for studying a susceptibility to a disease or condition associated with a KChIP1 (e.g., Type II diabetes). Drugs could be designed to regulate KChIP1 activation that in turn can be used to regulate signaling pathways and transcription events of genes downstream.

[0212] In another embodiment of the invention, assays can be used to identify polypeptides that interact with one or more KChIP1 polypeptides, as described herein. For example, a yeast two-hybrid system such as that described by Fields and Song (Fields, S. and Song, O., Nature 340:245-246 (1989)) can be used to identify polypeptides that interact with one or more KChIP1 polypeptides. In such a yeast two-hybrid system, vectors are constructed based on the flexibility of a transcription factor that has two functional domains (a DNA binding domain and a transcription activation domain). If the two domains are separated but fused to two different proteins that interact with one another, transcriptional activation can be achieved, and transcription of specific markers (e.g., nutritional markers such as His and Ade, or color markers such as lacZ) can be used to identify the presence of interaction and transcriptional activation. For example, in the methods of the invention, a first vector is used which includes a nucleic acid encoding a DNA binding domain and also a KChIP1 polypeptide, splicing variant, or fragment or derivative thereof, and a second vector is used which includes a nucleic acid encoding a transcription activation domain and also a nucleic acid encoding a polypeptide which potentially may interact with the KChIP1 polypeptide, splicing variant, or fragment or derivative thereof (e.g., a KChIP1 polypeptide binding agent or receptor). Incubation of yeast containing the first vector and the second vector under appropriate conditions (e.g., mating conditions such as used in the Matchmaker™ system from Clontech (Palo Alto, Calif., USA)) allows identification of colonies that express the markers of interest. These colonies can be examined to identify the polypeptide(s) that interact with the KChIP1 polypeptide or fragment or derivative thereof. Such polypeptides may be useful as agents that alter the activity of expression of a KChIP1 polypeptide, as described above.

[0213] In more than one embodiment of the above assay methods of the present invention, it may be desirable to immobilize either the KChIP1 gene or nucleic acid, the KChIP1 polypeptide, the KChIP1 binding agent, or other components of the assay on a solid support, in order to facilitate separation of complexed from uncomplexed forms of one or both of the polypeptides, as well as to accommodate automation of the assay. Binding of a test agent to the polypeptide, or interaction of the polypeptide with a binding agent in the presence and absence of a test agent, can be accomplished in any vessel suitable for containing the reactants. Examples of such vessels include microtitre plates, test tubes, and micro-centrifuge tubes. In one embodiment, a fusion protein (e.g., a glutathione-S-transferase fusion protein) can be provided which adds a domain that allows a KChIP1 nucleic acid, KChIP1 polypeptide, or a KChIP1 binding agent to be bound to a matrix or other solid support.

[0214] In another embodiment, modulators of expression of nucleic acid molecules of the invention are identified in a method wherein a cell, cell lysate, or solution containing a KChIP1 nucleic acid is contacted with a test agent and the expression of appropriate mRNA or polypeptide (e.g., splicing variant(s)) in the cell, cell lysate, or solution, is determined. The level of expression of appropriate mRNA or polypeptide(s) in the presence of the test agent is compared to the level of expression of mRNA or polypeptide(s) in the absence of the test agent. The test agent can then be identified as a modulator of expression based on this comparison. For example, when expression of mRNA or polypeptide is greater (statistically significantly greater) in the presence of the test agent than in its absence, the test agent is identified as a stimulator or enhancer of the mRNA or polypeptide expression. Alternatively, when expression of the mRNA or polypeptide is less (statistically significantly less) in the presence of the test agent than in its absence, the test agent is identified as an inhibitor of the mRNA or polypeptide expression. The level of mRNA or polypeptide expression in the cells can be determined by methods described herein for detecting mRNA or polypeptide.

[0215] This invention further pertains to novel agents identified by the above-described screening assays. Accordingly, it is within the scope of this invention to further use an agent identified as described herein in an appropriate animal model. For example, an agent identified as described herein (e.g., a test agent that is a modulating agent, an antisense nucleic acid molecule, a specific antibody, or a polypeptide-binding agent) can be used in an animal model to determine the efficacy, toxicity, or side effects of treatment with such an agent. Alternatively, an agent identified as described herein can be used in an animal model to determine the mechanism of action of such an agent.

[0216] Furthermore, this invention pertains to uses of novel agents identified by the above-described screening assays for treatments as described herein. In addition, an agent identified as described herein can be used to alter activity of a polypeptide encoded by a KChIP1 nucleic acid, or to alter expression of a KChIP1 nucleic acid, by contacting the polypeptide or the nucleic acid (or contacting a cell comprising the polypeptide or the nucleic acid) with the agent identified as described herein.

Pharmaceutical Compositions

[0217] The present invention also pertains to pharmaceutical compositions comprising nucleic acids described herein, particularly nucleotides encoding the polypeptides described herein (e.g., a KChIP1 polypeptide); comprising polypeptides described herein and/or comprising other splicing variants encoded by a KChIP1 nucleic acid; and/or an agent that alters (e.g., enhances or inhibits) KChIP1 nucleic acid expression or KChIP1 polypeptide activity as described herein. For instance, a polypeptide, protein (e.g., a KChIP1 nucleic acid receptor), an agent that alters KChIP1 nucleic acid expression, or a KChIP1 binding agent or binding partner, fragment, fusion protein or pro-drug thereof, or a nucleotide or nucleic acid construct (vector) comprising a nucleotide of the present invention, or an agent that alters KChIP1 polypeptide activity, can be formulated with a physiologically acceptable carrier or excipient to prepare a pharmaceutical composition. The carrier and composition can be sterile. The formulation should suit the mode of administration.

[0218] Suitable pharmaceutically acceptable carriers include but are not limited to water, salt solutions (e.g., NaCl), saline, buffered saline, alcohols, glycerol, ethanol, gum arabic, vegetable oils, benzyl alcohols, polyethylene glycols, gelatin, carbohydrates such as lactose, amylose or starch, dextrose, magnesium stearate, talc, silicic acid, viscous paraffin, perfume oil, fatty acid esters, hydroxymethylcellulose, polyvinyl pyrolidone, etc., as well as combinations thereof. The pharmaceutical preparations can, if desired, be mixed with auxiliary agents, e.g., lubricants, preservatives, stabilizers, wetting agents, emulsifiers, salts for influencing osmotic pressure, buffers, coloring, flavoring and/or aromatic substances and the like which do not deleteriously react with the active agents.

[0219] The composition, if desired, can also contain minor amounts of wetting or emulsifying agents, or pH buffering agents. The composition can be a liquid solution, suspension, emulsion, tablet, pill, capsule, sustained release formulation, or powder. The composition can be formulated as a suppository, with traditional binders and carriers such as triglycerides. Oral formulation can include standard carriers such as pharmaceutical grades of mannitol, lactose, starch, magnesium stearate, polyvinyl pyrollidone, sodium saccharine, cellulose, magnesium carbonate, etc.

[0220] Methods of introduction of these compositions include, but are not limited to, intradermal, intramuscular, intraperitoneal, intraocular, intravenous, subcutaneous, topical, oral and intranasal. Other suitable methods of introduction can also include gene therapy (as described below), rechargeable or biodegradable devices, particle acceleration devises (“gene guns”) and slow release polymeric devices. The pharmaceutical compositions of this invention can also be administered as part of a combinatorial therapy with other agents.

[0221] The composition can be formulated in accordance with the routine procedures as a pharmaceutical composition adapted for administration to human beings. For example, compositions for intravenous administration typically are solutions in sterile isotonic aqueous buffer. Where necessary, the composition may also include a solubilizing agent and a local anesthetic to ease pain at the site of the injection. Generally, the ingredients are supplied either separately or mixed together in unit dosage form, for example, as a dry lyophilized powder or water free concentrate in a hermetically sealed container such as an ampule or sachette indicating the quantity of active agent. Where the composition is to be administered by infusion, it can be dispensed with an infusion bottle containing sterile pharmaceutical grade water, saline or dextrose/water. Where the composition is administered by injection, an ampule of sterile water for injection or saline can be provided so that the ingredients may be mixed prior to administration.

[0222] For topical application, nonsprayable forms, viscous to semi-solid or solid forms comprising a carrier compatible with topical application and having a dynamic viscosity preferably greater than water, can be employed. Suitable formulations include but are not limited to solutions, suspensions, emulsions, creams, ointments, powders, enemas, lotions, sols, liniments, salves, aerosols, etc., which are, if desired, sterilized or mixed with auxiliary agents, e.g., preservatives, stabilizers, wetting agents, buffers or salts for influencing osmotic pressure, etc. The agent may be incorporated into a cosmetic formulation. For topical application, also suitable are sprayable aerosol preparations wherein the active ingredient, preferably in combination with a solid or liquid inert carrier material, is packaged in a squeeze bottle or in admixture with a pressurized volatile, normally gaseous propellant, e.g., pressurized air.

[0223] Agents described herein can be formulated as neutral or salt forms. Pharmaceutically acceptable salts include those formed with free amino groups such as those derived from hydrochloric, phosphoric, acetic, oxalic, tartaric acids, etc., and those formed with free carboxyl groups such as those derived from sodium, potassium, ammonium, calcium, ferric hydroxides, isopropylamine, triethylamine, 2-ethylamino ethanol, histidine, procaine, etc.

[0224] The agents are administered in a therapeutically effective amount. The amount of agents which will be therapeutically effective in the treatment of a particular disorder or condition will depend on the nature of the disorder or condition, and can be determined by standard clinical techniques. In addition, in vitro or in vivo assays may optionally be employed to help identify optimal dosage ranges. The precise dose to be employed in the formulation will also depend on the route of administration, and the seriousness of the symptoms, and should be decided according to the judgment of a practitioner and each patient's circumstances. Effective doses may be extrapolated from dose-response curves derived from in vitro or animal model test systems.

[0225] The invention also provides a pharmaceutical pack or kit comprising one or more containers filled with one or more of the ingredients of the pharmaceutical compositions of the invention. Optionally associated with such container(s) can be a notice in the form prescribed by a governmental agency regulating the manufacture, use or sale of pharmaceuticals or biological products, which notice reflects approval by the agency of manufacture, use of sale for human administration. The pack or kit can be labeled with information regarding mode of administration, sequence of drug administration (e.g., separately, sequentially or concurrently), or the like. The pack or kit may also include means for reminding the patient to take the therapy. The pack or kit can be a single unit dosage of the combination therapy or it can be a plurality of unit dosages. In particular, the agents can be separated, mixed together in any combination, present in a single vial or tablet. Agents assembled in a blister pack or other dispensing means is preferred. For the purpose of this invention, unit dosage is intended to mean a dosage that is dependent on the individual pharmacodynamics of each agent and administered in FDA approved dosages in standard time courses.

Methods of Therapy

[0226] The present invention also pertains to methods of treatment (prophylactic and/or therapeutic) for certain diseases and conditions associated with KChIP1. In particular, the invention relates to methods of treatment for Type II diabetes or a susceptibility to Type II diabetes, using a Type II diabetes therapeutic agent. A “Type II diabetes therapeutic agent” is an agent that alters (e.g., enhances or inhibits) KChIP1 polypeptide activity and/or KChIP1 nucleic acid expression, as described herein (e.g., a Type II diabetes nucleic acid agonist or antagonist). In certain embodiments, the Type II diabetes therapeutic agent alters activity and/or nucleic acid expression of KChIP1.

[0227] Type II diabetes therapeutic agents can alter KChIP1 polypeptide activity or nucleic acid expression by a variety of means, such as, for example, by providing additional KChIP1 polypeptide or by upregulating the transcription or translation of the KChIP1 nucleic acid; by altering posttranslational processing of the KChIP1 polypeptide; by altering transcription of KChIP1 splicing variants; or by interfering with KChIP1 polypeptide activity (e.g., by binding to a KChIP1 polypeptide), or by binding to another polypeptide that interacts with KChIP1, by altering (e.g., downregulating) the expression, transcription or translation of a KChIP1 nucleic acid, or by altering (e.g., agonizing or antagonizing) activity.

[0228] Representative Type II diabetes therapeutic agents include the following: nucleic acids or fragments or derivatives thereof described herein, particularly nucleotides encoding the polypeptides described herein and vectors comprising such nucleic acids (e.g., a gene, cDNA, and/or mRNA, such as a nucleic acid encoding a KChIP1 polypeptide or active fragment or derivative thereof, or an oligonucleotide; or a complement thereof, or fragments or derivatives thereof, and/or other splicing variants encoded by a Type II diabetes nucleic acid, or fragments or derivatives thereof); polypeptides described herein and/or splicing variants encoded by the KChIP1 nucleic acid or fragments or derivatives thereof; other polypeptides (e.g., KChIP1 receptors); KChIP1 binding agents; or agents that affect (e.g., increase or decrease) activity, antibodies, such as an antibody to an altered KChIP1 polypeptide, or an antibody to a non-altered KChIP1 polypeptide, or an antibody to a particular splicing variant encoded by a KChIP1 nucleic acid as described above; peptidomimetics; fusion proteins or prodrugs thereof; ribozymes; other small molecules; and other agents that alter (e.g., enhance or inhibit) expression of a KChIP1 nucleic acid, or that regulate transcription of KChIP1 splicing variants (e.g., agents that affect which splicing variants are expressed, or that affect the amount of each splicing variant that is expressed). More than one Type II diabetes therapeutic agent can be used concurrently, if desired.

[0229] A Type II diabetes nucleic acid therapeutic agent that is a nucleic acid is used in the treatment of Type II diabetes or in the treatment for a susceptibility to Type II diabetes. The term, “treatment” as used herein, refers not only to ameliorating symptoms associated with the disease or condition, but also preventing or delaying the onset of the disease or condition, and also lessening the severity or frequency of symptoms of the disease or condition. The therapy is designed to alter (e.g., inhibit or enhance), replace or supplement activity of a KChIP1 polypeptide in an individual. For example, a Type II diabetes therapeutic agent can be administered in order to upregulate or increase the expression or availability of the KChIP1 nucleic acid or of specific splicing variants of KChIP1 nucleic acid, or, conversely, to downregulate or decrease the expression or availability of the KChIP1 nucleic acid or specific splicing variants of the KChIP1 nucleic acid. Upregulation or increasing expression or availability of a native KChIP1 gene or nucleic acid or of a particular splicing variant could interfere with or compensate for the expression or activity of a defective gene or another splicing variant; downregulation or decreasing expression or availability of a native KChIP1 gene or of a particular splicing variant could minimize the expression or activity of a defective gene or the particular splicing variant and thereby minimize the impact of the defective gene or the particular splicing variant.

[0230] The Type II diabetes therapeutic agent(s) are administered in a therapeutically effective amount (i.e., an amount that is sufficient to treat the disease, such as by ameliorating symptoms associated with the disease, preventing or delaying the onset of the disease, and/or also lessening the severity or frequency of symptoms of the disease). The amount which will be therapeutically effective in the treatment of a particular individual's disorder or condition will depend on the symptoms and severity of the disease, and can be determined by standard clinical techniques. In addition, in vitro or in vivo assays may optionally be employed to help identify optimal dosage ranges. The precise dose to be employed in the formulation will also depend on the route of administration, and the seriousness of the disease or disorder, and should be decided according to the judgment of a practitioner and each patient's circumstances. Effective doses may be extrapolated from dose-response curves derived from in vitro or animal model test systems.

[0231] In one embodiment, a nucleic acid of the invention (e.g., a nucleic acid encoding a KChIP1 polypeptide, such as one of SEQ ID NO: 1 or a complement thereof); or another nucleic acid that encodes a KChIP1 polypeptide or a splicing variant, derivative or fragment thereof (e.g., comprising any one or more of SEQ ID NO: 114-258), can be used, either alone or in a pharmaceutical composition as described above. For example, a KChIP1 gene or nucleic acid or a cDNA encoding a KChIP1 polypeptide, either by itself or included within a vector, can be introduced into cells (either in vitro or in vivo) such that the cells produce native KChIP1 polypeptide. If necessary, cells that have been transformed with the gene or cDNA or a vector comprising the gene, nucleic acid or cDNA can be introduced (or re-introduced) into an individual affected with the disease. Thus, cells which, in nature, lack native KChIP1 expression and activity, or have altered KChIP1 expression and activity, or have expression of a disease-associated KChIP1 splicing variant, can be engineered to express the KChIP1 polypeptide or an active fragment of the KChIP1 polypeptide (or a different variant of the KChIP1 polypeptide). In certain embodiments, nucleic acids encoding a KChIP1 polypeptide, or an active fragment or derivative thereof, can be introduced into an expression vector, such as a viral vector, and the vector can be introduced into appropriate cells in an animal. Other gene transfer systems, including viral and nonviral transfer systems, can be used. Alternatively, nonviral gene transfer methods, such as calcium phosphate coprecipitation, mechanical techniques (e.g., microinjection); membrane fusion-mediated transfer via liposomes; or direct DNA uptake, can also be used.

[0232] Alternatively, in another embodiment of the invention, a nucleic acid of the invention; a nucleic acid complementary to a nucleic acid of the invention; or a portion of such a nucleic acid (e.g., an oligonucleotide as described below), can be used in “antisense” therapy, in which a nucleic acid (e.g., an oligonucleotide) which specifically hybridizes to the mRNA and/or genomic DNA of a Type II diabetes gene is administered or generated in situ. The antisense nucleic acid that specifically hybridizes to the mRNA and/or DNA inhibits expression of the KChIP1 polypeptide, e.g., by inhibiting translation and/or transcription. Binding of the antisense nucleic acid can be by conventional base pair complementarity, or, for example, in the case of binding to DNA duplexes, through specific interaction in the major groove of the double helix.

[0233] An antisense construct of the present invention can be delivered, for example, as an expression plasmid as described above. When the plasmid is transcribed in the cell, it produces RNA that is complementary to a portion of the mRNA and/or DNA which encodes the KChIP1 polypeptide. Alternatively, the antisense construct can be an oligonucleotide probe that is generated ex vivo and introduced into cells; it then inhibits expression by hybridizing with the mRNA and/or genomic DNA of the polypeptide. In one embodiment, the oligonucleotide probes are modified oligonucleotides, which are resistant to endogenous nucleases, e.g., exonucleases and/or endonucleases, thereby rendering them stable in vivo. Exemplary nucleic acid molecules for use as antisense oligonucleotides are phosphoramidate, phosphothioate and methylphosphonate analogs of DNA (see also U.S. Pat. Nos. 5,176,996; 5,264,564; and 5,256,775). Additionally, general approaches to constructing oligomers useful in antisense therapy are also described, for example, by Van der Krol et al., (BioTechniques 6:958-976 (1988)); and Stein et al., (Cancer Res. 48:2659 2668 (1988)). With respect to antisense DNA, oligodeoxyribonucleotides derived from the translation initiation site are preferred.

[0234] To perform antisense therapy, oligonucleotides (mRNA, cDNA or DNA) are designed that are complementary to mRNA encoding the KChIP1. The antisense oligonucleotides bind to KChIP1 mRNA transcripts and prevent translation. Absolute complementarity, although preferred, is not required. A sequence “complementary” to a portion of an RNA, as referred to herein, indicates that a sequence has sufficient complementarity to be able to hybridize with the RNA, forming a stable duplex; in the case of double-stranded antisense nucleic acids, a single strand of the duplex DNA may thus be tested, or triplex formation may be assayed. The ability to hybridize will depend on both the degree of complementarity and the length of the antisense nucleic acid, as described in detail above. Generally, the longer the hybridizing nucleic acid, the more base mismatches with an RNA it may contain and still form a stable duplex (or triplex, as the case may be). One skilled in the art can ascertain a tolerable degree of mismatch by use of standard procedures.

[0235] The oligonucleotides used in antisense therapy can be DNA, RNA, or chimeric mixtures or derivatives or modified versions thereof, single-stranded or double-stranded. The oligonucleotides can be modified at the base moiety, sugar moiety, or phosphate backbone, for example, to improve stability of the molecule, hybridization, etc. The oligonucleotides can include other appended groups such as peptides (e.g. for targeting host cell receptors in vivo), or agents facilitating transport across the cell membrane (see, e.g., Letsinger et al., Proc. Natl. Acad. Sci. USA 86:6553-6556 (1989); Lemaitre et al., Proc. Natl. Acad. Sci. USA 84:648-652 (1987); PCT International Publication NO: WO 88/09810) or the blood-brain barrier (see, e.g., PCT International Publication NO: WO 89/10134), or hybridization-triggered cleavage agents (see, e.g., Krol et al., BioTechniques 6:958-976 (1988)) or intercalating agents. (See, e.g., Zon, Pharm. Res. 5:539-549 (1988)). To this end, the oligonucleotide may be conjugated to another molecule (e.g., a peptide, hybridization triggered cross-linking agent, transport agent, hybridization-triggered cleavage agent).

[0236] The antisense molecules are delivered to cells that express KChIP1 in vivo. A number of methods can be used for delivering antisense DNA or RNA to cells; e.g., antisense molecules can be injected directly into the tissue site, or modified antisense molecules, designed to target the desired cells (e.g., antisense linked to peptides or antibodies that specifically bind receptors or antigens expressed on the target cell surface) can be administered systematically. Alternatively, in a preferred embodiment, a recombinant DNA construct is utilized in which the antisense oligonucleotide is placed under the control of a strong promoter (e.g., pol III or pol II). The use of such a construct to transfect target cells in the patient results in the transcription of sufficient amounts of single stranded RNAs that will form complementary base pairs with the endogenous KChIP1 transcripts and thereby prevent translation of the KChIP1 mRNA. For example, a vector can be introduced in vivo such that it is taken up by a cell and directs the transcription of an antisense RNA. Such a vector can remain episomal or become chromosomally integrated, as long as it can be transcribed to produce the desired antisense RNA. Such vectors can be constructed by recombinant DNA technology methods standard in the art and described above. For example, a plasmid, cosmid, YAC or viral vector can be used to prepare the recombinant DNA construct that can be introduced directly into the tissue site. Alternatively, viral vectors can be used which selectively infect the desired tissue, in which case administration may be accomplished by another route (e.g., systemically).

[0237] Endogenous KChIP1 polypeptide expression can also be reduced by inactivating or “knocking out” the gene, nucleic acid or its promoter using targeted homologous recombination (e.g., see Smithies et al., Nature 317:230-234 (1985); Thomas & Capecchi, Cell 51:503-512 (1987); Thompson et al., Cell 5:313-321 (1989)). For example, an altered, non-functional gene or nucleic acid (or a completely unrelated DNA sequence) flanked by DNA homologous to the endogenous gene or nucleic acid (either the coding regions or regulatory regions of the nucleic acid) can be used, with or without a selectable marker and/or a negative selectable marker, to transfect cells that express the gene or nucleic acid in vivo. Insertion of the DNA construct, via targeted homologous recombination, results in inactivation of the gene or nucleic acid. The recombinant DNA constructs can be directly administered or targeted to the required site in vivo using appropriate vectors, as described above. Alternatively, expression of non-altered genes or nucleic acids can be increased using a similar method: targeted homologous recombination can be used to insert a DNA construct comprising a non-altered functional gene or nucleic acid, e.g., a nucleic acid comprising one or more of SEQ ID NOs: 114-258 or the complement thereof, or a portion thereof, in place of an altered KChIP1 in the cell, as described above. In another embodiment, targeted homologous recombination can be used to insert a DNA construct comprising a nucleic acid that encodes a Type II diabetes polypeptide variant that differs from that present in the cell.

[0238] Alternatively, endogenous KChIP1 nucleic acid expression can be reduced by targeting deoxyribonucleotide sequences complementary to the regulatory region of a KChIP1 nucleic acid (i.e., the KChIP1 promoter and/or enhancers) to form triple helical structures that prevent transcription of the KChIP1 nucleic acid in target cells in the body. (See generally, Helene, C., Anticancer Drug Des., 6(6):569-84 (1991); Helene, C. et al., Ann. N.Y. Acad. Sci. 660:27-36 (1992); and Maher, L. J., Bioassays 14(12):807-15 (1992)). Likewise, the antisense constructs described herein, by antagonizing the normal biological activity of one of the KChIP1 proteins, can be used in the manipulation of tissue, e.g., tissue differentiation, both in vivo and for ex vivo tissue cultures. Furthermore, the anti-sense techniques (e.g., microinjection of antisense molecules, or transfection with plasmids whose transcripts are anti-sense with regard to a Type II diabetes gene mRNA or gene sequence) can be used to investigate the role of KChIP1 or the interaction of KChIP1 and its binding agents in developmental events, as well as the normal cellular function of KChIP1 or of the interaction of KChIP1 and its binding agents in adult tissue. Such techniques can be utilized in cell culture, but can also be used in the creation of transgenic animals.

[0239] In yet another embodiment of the invention, other Type II diabetes therapeutic agents as described herein can also be used in the treatment or prevention of a susceptibility to a disease or condition associated with a Type II diabetes gene. The therapeutic agents can be delivered in a composition, as described above, or by themselves. They can be administered systemically, or can be targeted to a particular tissue. The therapeutic agents can be produced by a variety of means, including chemical synthesis; recombinant production; in vivo production (e.g., a transgenic animal, such as U.S. Pat. No. 4,873,316 to Meade et al.), for example, and can be isolated using standard means such as those described herein.

[0240] A combination of any of the above methods of treatment (e.g., administration of non-altered polypeptide in conjunction with antisense therapy targeting altered mRNA of KChIP1; administration of a first splicing variant encoded by a KChIP1 nucleic acid in conjunction with antisense therapy targeting a second splicing encoded by a KChIP1 nucleic acid) can also be used.

[0241] The present invention is now illustrated by the following Exemplification, which is not intended to be limiting in any way. All references cited herein are incorporated by reference in their entirety.

### EXEMPLIFICATION

[0242] The study was done in collaboration with the Icelandic Heart Association, who provided an encrypted list of 1350 diabetic patients. In 1967-1991, the Heart Association started a study of cardiovascular disease and its complications. Measurements of blood sugar were included in a thorough check-up of the participants which results led to many individuals being diagnosed with diabetes. The list of participants is an unbiased sample of about a third of the Icelandic nation. Individuals diagnosed in the years following 1991 were either diagnosed at the Icelandic Heart Association or at one of two major hospitals in Reykjavik, Iceland.

[0243] All participants in the Type II diabetes study visited the Icelandic Heart Association where each answered a questionnaire, had blood drawn, a blood sugar assessment, and measurements taken. Height (m) and weight (kg) were measured to calculate the body mass index. In serum, the fasting blood glucose and triglyceride levels were measured as well. Diagnoses of Type II diabetes were based on the diagnostic criteria set by the World Health Organization (1999). All patients with fasting glucose above 7 mM were diagnosed as having Type II diabetes and individuals with fasting blood sugar between 6.1-6.9 mM were diagnosed with impaired fasting glucose. If the participants had no prior history of diabetes, they were requested to come in for another test to have their diagnosis confirmed. All individuals on diabetic medication were classified as Type II. The questionnaire included questions regarding age at diagnosis and type of medication. All patients were requested to bring two relatives who's DNA was used to confirm the genetotypes of the patients.

[0244] Since the patients had participated in a study that was conducted between 1967-1991 a considerable time had passed, in some instances, since they had visited the Heart Association. Therefore, all the patients were required to have another fasting blood glucose test to check on their blood sugar level at the time of participation in the study. Thus, all patients were labeled unconfirmed, meaning that results of blood glucose levels were pending, for this particular study. A label of confirmed diabetic was given to the patient when the measurements were received. Linkage analyses were done with confirmed patients and unconfirmed patients were included only if they were close relatives of a confirmed index patient. The initial list of patients included 1350 Type II diabetics, but during this study new patients were diagnosed who were relatives of the index patients. All participants with no previous history of diabetes but with elevated fasting glucose were diagnosed according to the WHO criteria as described above. At present date, 1406 Type II diabetics and 266 patients with impaired fasting glucose have participated in the study, together with 3972 of their close relatives.

[0245] This study was approved by the Data Protection Commission of Iceland and the National Bioethics Committee of Iceland. All patients and their relatives who participated in the Study gave informed consents.

Outline of the Study

[0246] This particular genetic study, which has the aim of identifying a genetic variant or a gene that may contribute to type II diabetes by using a positional cloning approach, can be divided into three steps:
[0247] i. Genome-wide linkage study, where excess allele sharing among related type II diabetics is used to identify a chromosomal segment, typically 2-8 Megabases long, that may harbor a disease susceptibility gene/genes.
[0248] ii. Locus-wide association study, where a high-density of microsatellite markers is typed in a large patient and control cohort. By comparing the frequencies of individual alleles or haplotypes between the two cohorts, the location of the putative disease gene/genes is narrowed down to a few hundred kilobases.
[0249] iii. Candidate gene assessment, where additional microsatellites and/or SNPs are typed in all genes that are identified within the smaller candidate region and further association analysis is used to identify which of the genes shows strong association to the disease.
   Linkage Analysis
   Pedigree Construction

[0250] For the linkage analysis, blood samples were obtained from 964 Type II diabetics and 203 individuals with impaired fasting glucose. The patients were clustered into families such that each patient is related to (within and including six meiotic events) at least one other patient. In this manner, 772 patients fell into families—705 Type II diabetics and 67 with impaired fasting glucose. The confirmed Type II patients were treated as probands and clustered into families that each proband is related to, within and including six meiotic events. The other patients, unconfirmed Type II and IFG patients, were added to the families if they were related to a proband within and including three meiotic events. The rational behind this was to include as many patients as possible in the study. Impaired fasting glucose is an immediate diagnosis, and we assumed that the more closely related these patients are to the confirmed diabetics, the likelier they are to have or to develop the disease.

[0251] The families were checked for relationship errors by comparing the identity-by state (IBS) distribution for the set of 906 markers, for each pair of related and genotyped individuals, to a reference distribution corresponding to the particular degree of relatedness. The reference distributions were constructed from a large subset of the Icelandic population. Individuals were excluded from the study if their relationship with the rest of the family was inconsistent with the relationship specified in the geneology database.

[0252] The remaining material that was available for the study was the following: 763 now confirmed Type II patients in 227 families together with 764 genotyped relatives. Of the patients, 667 were confirmed Type II patients, 35 unconfirmed Type II patients, 52 confirmed patients with impaired fasting glucose (IFG) and 9 unconfirmed patients with IFG.

Stratification of the Patient Material

[0253] The patients were classified into two sub-phenotypes based on their BMI: non-obese Type II diabetes are patients who have BMI less than 30, and obese Type II diabetes are patients who have BMI at or above 30. The reason for fractionating the diabetics into non-obese and obese groups is that other factors may be influencing the pathogenesis of disease in these two groups. Obesity alone could be contributing to the diabetic phenotype. Therefore, this factor was separated. Obesity is most likely due to a combination of environmental and genetic factors. This fractionation into non-obese and obese diabetics practically separates the material into two halves; 60% of the patients are in the non-obese category (20% with BMI below 25 (lean) and 40% with BMI between 25-30 (overweight)), and 40% of the patients are in the obese category (BMI above 30).

[0254] An affected-only linkage analysis for each of those sub-phenotypes was performed, using the same set of families as above, but classifying patients not belonging to the particular sub-group as having an unknown disease status. Restricted to a particular sub-phenotype, some families no longer contain a pair of related patients classified as affecteds and hence do not contribute in the linkage analysis. Such families were excluded from the analysis of the particular sub-phenotype. The number of patients and families used in the linkage analysis is summarized in Table 1 below.

[0255] Table 1: The number of patients and families that contribute to the genome-wide linkage scan, both when all the patients are used, and when the analysis is restricted to obese or non-obese diabetic patients, respectively.

TABLE 1
ts6Phenotype and Patients

| | | NO: of families | NO: of patients |
|---|---|---|---|
| | Total Number | contributing to | contributing to |
| Phenotype | of Patients | the analysis | the analysis |
| All diabetics | 763 | 227 | 763 |
| Obese | 296 | 92 | 219 |
| Non-obese | 467 | 154 | 413 |

[0256] Genome Wide Scan

[0257] A genome wide scan was performed on 772 patients and their relatives. Nine patients were excluded due to inheritance errors so the linkage analysis was performed with 763 patients and 764 relatives. The procedure was as described in Gretarsdóttir, et al., Am J Hum Genet., 70(3):593-603 (2002). In short, the DNA was genotyped with a framework marker set of 906 microsatellite markers with an average resolution of 4 cM. Alleles were called automatically with the TrueAllele program (Cybergenetics, Co., Pittsburgh, Pa.), and the program DecodeGT (deCODE genetics, ehf., Iceland), was used to fractionate according to quality and edit the called genotypes (Palsson, B., et al., Genome Res., 9(10):1002-1012 (1999)). The population allele frequencies for the markers were constructed from a cohort of more than 30,000 Icelanders that have participated in genome-wide studies of various disease projects at deCODE genetics. Additional markers were genotyped within the locus on chromosome 5q, where we observed the strongest linkage signal, to increase the information on identity by descent (IBD) sharing within the families. For those markers, at least 180 Icelandic controls were genotyped to derive the population allele frequencies.

[0258] The additional microsatellite markers that were genotyped within the locus were either publicly available or designed at deCODE genetics; those markers are indicated with a DG designation. Repeats within the DNA sequence were identified that allowed us to choose or design primers that were evenly spaced across the locus. The identification of the repeats and location with respect to other markers was based on the work of the physical mapping team at deCODE genetics.

[0259] For the markers used in the genomewide scan, the genetic positions were taken from the recently published high-resolution genetic map (HRGM), constructed at deCODE genetics (Kong A., et al., Nat Genet., 31: 241-247 (2002)). The genetic position of the additional markers are either taken from the HRGM, when available, or by applying the same genetic mapping methods as were used in constructing the HRGM map to the family material genotyped for this particular linkage study.

Statistical Methods for Linkage Analysis

[0260] The linkage analysis is done using the software Allegro (Gudbjartsson et al., Nat. Genet. 25:12-3, (2000)) that determines the statistical significance of excess sharing among related patients by applying non-parametric affected-only allele-sharing methods (without any particular disease inheritance model being specified). Allegro, a linkage program developed at deCODE genetics, calculates LOD scores based on multipoint calculations. Our baseline linkage analysis uses the Sₚₐᵢᵣₛ scoring function (Whittemore, A. S. and Halpern, J., Biometrics 50:118-27 (1994); Kruglyak L, et al., Am J Hum Genet 58:1347-63, (1996)), the exponential allele-sharing model (Kong, A. and Cox, N. J., Am. J. Hum. Genet., 61:1179 (1997)), and a family weighting scheme which is halfway on a log scale between weighting each affected pair equally and weighting each family equally. In the analysis, all genotyped individuals who are not affected are treated as “unknown”. Because of concern with small sample behavior, we usually compute corresponding P-values in two different ways for comparison. The first P-value is computed based on large sample theory; Zₗᵣ=√(2 logₑ(10) LOD) and is approximately distributed as a standard normal distribution under the null hypothesis of no linkage. A second P-value is computed by comparing the observed LOD score to its complete data sampling distribution under the null hypothesis. When a data set consists of more than a handful of families, these two P-values tend to be very similar.

[0261] All suggestive loci with LOD scores greater than 2 are followed up with some extra markers to increase the information on the IBD-sharing within the families and to decrease the chance that a LOD score represents a false-positive linkage. The information measure we use was defined by Nicolae (D. L. Nicolae, Thesis, University of Chicago (1999)) and is a part of the Allegro program output. This measure is closely related to a classical measure of information as previously described by Dempster et al. (Dempster, A. P., et al., J. R. Statist. Soc. B, 39:1 (1977)); the information equals zero if the marker genotypes are completely uninformative and equals one if the genotypes determine the exact amount of allele sharing by descent among the affected relatives. Using the framework marker set with average marker spacing of 4 cM typically results in information content of about 0.7 in the families used in our linkage analysis. Increasing the marker density to one marker every centimorgan usually increases the information content above 0.85.

Results

[0262] The results of the genome-wide linkage analysis with the framework marker set are shown in FIG. 4 which depicts the allele-sharing LOD-score versus the genetic distance from the p-terminus in centimorgan (cM) for each of the 23 chromosomes. The analysis was performed with the three phenotypes: all Type II diabetics (solid lines), non-obese diabetics (dashed lines) and obese diabetics (dotted lines). A LOD-score of 1.84 is observed on chromosome 5q34-q35.2 with the framework marker set when we use all Type II diabetics in the analysis. When the linkage analysis is restricted to non-obese diabetics, this LOD-score increases to 2.81. The obese diabetics do not show linkage in this region.

[0263] Additional markers were genotyped in this area to increase the information content and to confirm the linkage. The information on the IBD-sharing at this locus was about 78% with the framework marker set. In order to increase the information content, another 38 microsatellite markers were genotyped within a 40 cM region that includes the observed signal. Repeating the linkage analysis including the additional markers increased the LOD-score to 3.64 (P-value=3.18×10⁻⁵) for the non-obese diabetics. For all patients, the peak LOD-score increased to 2.9 (P-value=1.22×10⁻⁴). This is shown in FIG. 5.

[0264] The peak of the LOD-score is centered on marker D5S625 and the region determined by a drop of one in the LOD is from marker DG5S5 to marker D5S429, centromeric and telomeric respectively. The one-LOD-drop is about 9 cM and estimated to be about 3.5 Mb. This 1-LOD-drop roughly corresponds to the 80-90% confidence interval for the location of a putative disease associated gene.

Locus-Wide Association Study

Genotyping to Narrow Down the Region of Linkage

[0265] In order to narrow down the region of interest, the linkage analysis is followed by a comprehensive association study of the 1-LOD-drop. This is necessary as the linkage analysis has limited resolution; it compares sharing among closely related individuals that share on average large chromosomal segments. For the association analysis, we identified a large number of additional microsatellite markers located in the 1-LOD-drop and typed those markers in both our patient cohort and in a large number of unrelated controls randomly selected from the Icelandic population.

[0266] Sixty-seven markers were identified and typed in the 1-LOD-drop in addition to the 17 markers already typed and used in the linkage analysis (locus-wide association micorsatellites; Table 6). The new polymorphic repeats (dinucleotide or trinucleotide repeats) were identified with the Sputnik program. We subtracted the smaller allele of CEPH sample 1347-02 (CEPH genomics repository) from the alleles of the microsatellites and used it as a reference. A total of 84 markers were available for the association analysis, i.e., an average density of one marker every 42 kb or one marker every 0.107 cM. All those markers were typed for 590 non-obese diabetics and 477 unrelated controls.

Statistical Methods for Association and Haplotype Analysis

[0267] For single marker association to the disease, Fisher exact test was used to calculate a two-sided P-value for each individual allele. When presenting the results, we use allelic frequencies rather than carrier frequencies for microsatellites, SNPs and haplotypes. Haplotype analyses are performed using a computer program we developed at deCODE called NEMO (NEsted MOdels) (Gretarsdóttir, et al., Nat Genet. 2003 October; 35(2):131-8). NEMO was used both to study marker-marker association and to calculate linkage disequilibrium (LD) between markers, and for case-control haplotype analysis. With NEMO, haplotype frequencies are estimated by maximum likelihood and the differences between patients and controls are tested using a generalized likelihood ratio test. The maximum likelihood estimates, likelihood ratios and P-values are computed with the aid of the EM-algorithm directly for the observed data, and hence the loss of information due to the uncertainty with phase and missing genotypes is automatically captured by the likelihood ratios, and under most situations, large sample theory can be used to reliably determine statistical significance. The relative risk (RR) of an allele or a haplotype, i.e., the risk of an allele compared to all other alleles of the same marker, is calculated assuming the multiplicative model (Terwilliger, J. D. & Ott, J. A haplotype-based ‘haplotype relative risk’ approach to detecting allelic associations. Hum. Hered. 42, 337-46 (1992) and Falk, C. T. & Rubinstein, P. Haplotype relative risks: an easy reliable way to construct a proper control sample for risk calculations. Ann. Hum. Genet. 51 (Pt 3), 227-33 (1987)), together with the population attributable risk (PAR).

[0268] In the haplotype analysis, it may be useful to group haplotypes together and test the group as a whole for association to the disease. This is possible to do with NEMO. A model is defined by a partition of the set of all possible haplotypes, where haplotypes in the same group are assumed to confer the same risk while haplotypes in different groups can confer different risks. A null hypothesis and an alternative hypothesis are said to be nested when the latter corresponds to a finer partition than the former. NEMO provides complete flexibility in the partition of the haplotype space. In this way, it is possible to test multiple haplotypes jointly for association and to test if different at-risk haplotypes confer different risk. As a measure of LD, we use two standard definitions of LD, D′ and R² (Lewontin, R., Genetics, 49:49-67 (1964) and Hill, W. G. and A. Robertson, Theor. Appl. Genet., 22:226-231 (1968)) as they provide complementary information on the amount of LD. For the purpose of estimating D′ and R², the frequencies of all two-marker allele combinations are estimated using maximum likelihood methods and the deviation from linkage disequilibrium is evaluated using a likelihood ratio test. The standard definitions of D′ and R² are extended to include microsatellites by averaging over the values for all possible allele combinations of the two markers weighted by the marginal allele probabilities.

[0269] The number of possible haplotypes that can be constructed out of the dense set of markers genotyped in the 1-LOD-drop is very large and even though the number of haplotypes that are actually observed in the patient and control cohort is much smaller, testing all those haplotypes for association to the disease is a formidable task Note that we do not restrict our analysis to haplotypes constructed from a set of consecutive markers, as some markers may be very mutable and might split up an otherwise well conserved haplotype constructed out of surrounding markers.

[0270] The approach for identifying those haplotypes in the candidate region that show strongest association to the disease is two-fold. First, the haplotypes are restricted and tested to span a sub-region small enough that the included markers may be expected to be in substantial LD. In this study, only haplotypes that span less than 300 kb are considered. Second, an iterative procedure that gradually builds up the most significant haplotypes is applied. Starting with haplotypes constructed out of 3 markers, those haplotypes are selected that show strong association to the disease, other nearby markers to those haplotypes and repeat the association test are added. By iterating this procedure, identification of those haplotypes that show strongest association to the disease is expected.

Results

[0271] For the association analysis, 590 non-obese Icelandic Type II diabetes patients and 477 unrelated population controls using a total of 84 microsatellite markers were genotyped. These markers are distributed evenly across a region of approximately 3.5 Mb. The region is centered on our linkage peak and corresponds to the 1-LOD-drop. Then, the procedure described above is appliced and single-markers and haplotypes consisting of up to 5 markers that showed association to the disease are searched. The result is summarized in FIG. 6. In FIG. 6, the location of a marker or a haplotype on the horizontal axis and the corresponding P-value from the associaton test on the vertical axis is shown. This is shown for all haplotypes tested that have a P-value less than 0.01. The horizontal bars indicated the size of the corresponding haplotypes and the location of all markers is shown at the bottom of the figure. All locations are in Mb and refer to the NCBI Build33.

[0272] A series of correlated haplotypes that show strong association for non-obese diabetics in two locations within the 1-LOD-drop were observed. Those are denoted regions A (168.37-168.83 Mb) and B (169.70-170.17 Mb), and Table 10 lists the most significant haplotype in each of these regions. For each haplotype, the table includes a two-sided single-test P-value for association, calculated using NEMO, the corresponding relative risk, the estimated frequency of the haplotype in the patient and the control cohorts, the region the haplotype spans, and the markers and alleles (in bold) that define the haplotype.

[0273] Note, however, that some of the haplotypes listed within each of the two regions are very correlated and should be considered as a single observation of association to the disease. This is demonstrated for region B in Table 3, which lists the pairwise correlation, both D′ and R², between the haplotypes. Based on the correlation, we observe that haplotypes B2 and B4 are strongly correlated and should be considered as a single observation of association to this region. Likewise, haplotypes B1 and B5 are strongly correlated. However, haplotypes B1, B2 and B3 are all weakly correlated with each other; and in fact, B1 and B2 are mutually exclusive, i.e., never appear jointly on the same chromosome. These three haplotypes hence constitute three almost independent observations of association to non-obese diabetes of this region within the locus. It is possible to test haplotypes B1, B2 and B3 together as a group for association to non-obese diabetes. This test yields a P-value=8.5×10⁻⁸ with a corresponding relative risk of 5.2, a population attributable risk of 13.9%, and an allelic frequency of 0.089 and 0.018 in the patient and the control cohorts, respectively.

TABLE 2
Table 2: Haplotypes within the 1-LOD-drop that show the strongest association to non-obese
diabetes. For each haplotype, it is shown (i) a two-sided P-value for a single test
of association to non-obese diabetes, (ii) the corresponding relative risk (RR), (iii)
the estimated allelic frequency of the haplotype in the patient and the control cohort,
(iv) the span of the haplotype (refering to NCBI 33) and (v) the alleles (in bold) and
markers that define the haplotype. The haplotypes are separated into two groups, A and
B, corresponding to two different regions within the 1-LOD-drop.

| | | | | | Span | |
|---|---|---|---|---|---|---|
| | P-value | RR | Aff. frq | Ctrl. frq | (Mb) | Haplotype |
| A1 | 0.000005 | >10 | 0.033 | 0.000 | 168.37- | 0 DG5S879 4 DG5S881 −4 D5S2075 |
| | | | | | 168.72 | 0 DG5S883 4 DG5S38 |
| A2 | 0.000006 | 3.81 | 0.053 | 0.015 | 168.55- | 4 DG5S1058 −6 DG5S37 |
| | | | | | 168.77 | |
| A3 | 0.000008 | 3.64 | 0.054 | 0.015 | 168.55- | 4 DG5S1058 −6 DG5S37 0 |
| | | | | | 168.83 | DG5S101 |
| A4 | 0.000015 | 6.18 | 0.046 | 0.008 | 168.40- | 4 DG5S881 4 DG5S1058 −4 |
| | | | | | 168.72 | D5S2075 0 DG5S883 4 DG5S38 |
| A5 | 0.000015 | 4.42 | 0.047 | 0.011 | 168.37- | 0 DG5S879 4 DG5S1058 −6 |
| | | | | | 168.77 | DG5S37 |
| A6 | 0.000018 | 6.94 | 0.045 | 0.007 | 168.40- | 4 DG5S881 −4 D5S2075 0 DG5S883 |
| | | | | | 168.72 | 4 DG5S38 |
| B1 | 0.000011 | >10 | 0.039 | 0.000 | 169.87- | 0 DG5S953 0 DG5S955 0 DG5S13 5 |
| | | | | | 170.17 | DG5S959 |
| B2 | 0.000023 | >10 | 0.034 | 0.000 | 169.65- | 27 DG5S888 0 DG5S953 |
| | | | | | 169.87 | |
| B3 | 0.000023 | 5.26 | 0.049 | 0.010 | 169.87- | 0 DG5S953 0 DG5S955 4 DG5S124 |
| | | | | | 170.04 | |
| B4 | 0.000031 | >10 | 0.034 | 0.000 | 169.65- | 27 DG5S888 0 DG5S44 0 DG5S953 |
| | | | | | 169.87 | |
| B5 | 0.000060 | >10 | 0.034 | 0.000 | 169.87- | 0 DG5S953 0 DG5S955 0 DG5S13 0 |
| | | | | | 170.17 | DG5S123 5 DG5S959 |

[0274] TABLE 3
Table 3: Pairwise correlation between the five haplotypes in
the B-region that show the strongest association to non-obese
diabetes. Estimates of D′ are shown in the upper right corner,
and estimates of R² are shown the the lower left corner. The
haplotypes are labelled B1, . . . , B5 as in Table 2.

D′

| R2 | B1 | B2 | B3 | B4 | B5 |
|---|---|---|---|---|---|
| B1 | — | 0 | 0 | 0 | 1 |
| B2 | 0 | — | 0.4 | 1 | 0 |
| B3 | 0 | 0.1 | — | 0.35 | 0 |
| B4 | 0 | 0.96 | 0.7 | — | 0 |
| B5 | 0.92 | 0 | 0 | 0 | — |

Investigation of Region B
Genes in Region B

[0275] All genes in and around region B (UCSC) were then identified. In the region defined by the five most significant haplotypes, 169.70-170.17 Mb, there are four genes, LCP2 (lymphocyte cytosolic protein 2), KCNMB1 (potassium large conductance calcium-activated channel, subfamily M, beta member 1), KChIP1 (Kv channel interacting protein 1) and GABRP (gamma-aminobutyric acid (GABA) A receptor, pi). Of those genes, KChIP1 is by far the largest, stretching from 169.7 to 170.1 MB, or almost the entire span of the observed haplotype association. The other three genes are small. In addition, there is a big gene, RANBP17 (RAN binding protein 17), just telomeric of the location of the observed association signal. The relative location of all the genes is shown in FIG. 7, which shows the location of the exons of KCHIP1 as solid bars, and the location of the other genes as shaded boxes. In addition, FIG. 7 shows the location of the microsatellites (filled boxes) that we have typed in this region and the location of the at-risk haplotypes B1, . . . , B5 (gray horizontal lines).

Description of New Splice Variants of KChIP1 Identified by RACE and PCR

[0276] The published sequence for KChIP1 comprises exons 1 to 8. New exons belonging to the KChIP1 gene and four different splice variants were discovered by performing RACE or PCR (primers within the exons) using as template human Marathon cDNA and cDNA prepared from rat pancreatic INS1 beta cells. In all, 6 new exons located in the 5′ region of the gene were discovered. An alternative exon 1 was found and called exon 1a. Here, the published sequence is labelled for exon 1 with a “b” to distinguish it from the alternative exon 1, exon 1a. Four exons are called UTR 1, UTR 2, UTR 3 and UTR 4, or untranslated region 1-4, because they lie upstream of exon 1b and they are not translated. The last exon to be identified is called Ins-r, or insert rodent, because it was known to be present in mouse and rat, and has recently been demonstrated by others to be present in humans as well (Boland et al., Am. J. Physiol. Cell Physiol., 285, C161-170. (2003)). See nucleotide sequences of the new exons below, as well as their location in the genomic sequence of NCBI build 33. Even if not mentioned, all new variants of KChIP1 found and described below include exons 2-8 of the published sequence.

[0277] Splice variant 1 consists of exon 1a, UTR1, UTR2, UTR3, UTR4 and exon 1b. Exon 1a is untranslated and the resulting protein is identical in amino acid sequence to KChIP1 described by An et al. (Nature 430, 553-556 (2000), see also FIG. 2). This variant was observed in human heart and testis and the rat INS1 cell line.

[0278] Splice variant 2 consists of exon 1b and the Ins-r exon giving rise to a protein that is identical in amino acid sequence to KChIP1 described by Boland et al. This variant was observed in human brain, heart, pancreas and the rat INS1 cell line.

[0279] Splice variant 3 consists of exon 1a and is identical in nucleotide sequence to AL538404, an EST in NCBI. The amino acid sequence of the N-terminus coded by exon 1a is unique (see sequence below) but the amino acid sequence coded by exons 2-8 is that of the published sequence. This variant was observed in human brain, heart, pancreas, skeletal muscle, adipose tissue, liver, hypothalamus, small intestine, testis and the rat INS1 cell line.

[0280] Splice variant 4 consists of exons 1a and UTR1, which would result in a protein translated from exons 2-8. The second methionine in exon 2 has a Kozak sequence. This variant was observed in human heart.

[0281] The nucleotide sequences of the new exons are as follows (the genomic locations given are from NCBI build 33, see also Table 8):

| | |
|---|---|
| Exon 1a: 169716298-169716511 (Build 33) | |
| GGCTTCAGGGGTGCATCCGTCACTCAGGGTTCATTGACCCAGGCAGGCTCCAAGT | (SEQ ID NO: 4) |
| TCCTGGGGTGCACAAGGTGGGCACTGTCCCTTCTGGGTGCTGACAGCAGAGCCTG | |
| GCTCCCCTCCGCCACCATGAGCGGCTGCTCCAAAAGATGCAAGCTTGGGTTCGTG | |
| AAATTTGCCCAGACCATCTTTAAGCTCATCACTGGGACCCTCAGCAAAG | |
| UTR 1: 169848417-169848523 (Build 33) | |
| ACTCAGCATCATCAAGACTGGAGGGACAGAGCATTTGAATCATCAGACGCTGGGC | (SEQ ID NO: 5) |
| CAGACGTCACCCCACGCGTTTTCTCATTTTATC GTCCTAAGAAGCCCAGAAG | |
| UTR 2: 169861083-169861154 (Build 33) | |
| CCTGAATGCAATTTGCAATGAGGAGATGATTTGATTTTCTTCAGCCCTAGACCTCC | (SEQ ID NO: 6) |
| AGCTTCCTGAGAGCAG | |
| UTR 3: 169864589-169864679 (Build 33) | |
| GGGTTCCCCAGGAGACCACGACAGAGGCCTGGAACCCAAGTTCTAATCCCACATC | (SEQ ID NO: 7) |
| CTGGCTGGGCAACTTCAGGCAAATTTCTAACACAAG | |
| UTR 4: 169867066-169867173 (Build 33) | |
| GGTAGGGGAGGGGCCGGGCCCGGGGTCCCAACTCGCACTCAAGTCTTCGCTGCCA | (SEQ ID NO: 8) |
| TGGGGGCCGTCATGGGCACCTTCTCATCTCTGCaAACCAAACAAAGGCGACCC | |
| Ins-r 170075401-170075433 | |
| ACATCGCCTGGTGGTATTACCAGTATCAGAGAG | (SEQ ID NO: 9) |

[0282] The nucleotide sequence derived from splice variant 4 (KChIP1.4) with the ATG and a Kozak sequence ((G/ANNATGG) underlined is as follows:

| | |
|---|---|
| ATAAGATTGAAGATGAGCTGGAGATGACCATGGTTTGCCATCGGCCCGAGGGACT | (SEQ ID NO: 10) |
| GGAGCAGCTCGAGGCCCAGACCAACTTCACCAAGAGGGAGCTGCAGGTCCTTTAT | |
| CGAGGCTTCAAAAATGAGTGCCCCAGTGGTGTGGTCAACGAAGACACATTCAAGC | |
| AGATCTATGCTCAGTTTTTCCCTCATGGAGATGCCAGCACGTATGCCCATTACCTC | |
| TTCAATGCCTTCGACACCACTCAGACAGGCTCCGTGAAGTTCGAGGACTTTGTAAC | |
| CGCTCTGTCGATTTTATTGAGAGGAACTGTCCACGAGAAACTAAGGTGGACATTT | |
| AATTTGTATGACATCAACAAGGACGGATACATAAACAAAGAGGAGATGATGGAC | |
| ATTGTCAAAGCCATCTATGACATGATGGGGAAATACACATATCCTGTGCTCAAAG | |
| AGGACACTCCAAGGCAGCATGTGGACGTCTTCTTCCAGAAAATGGACAAAAATAA | |
| AGATGGCATCGTAACTTTAGATGAATTTCTTGAATCATGTCAGGAGGACGACAAC | |
| ATCATGAGGTCTCTCCAGCTGTTTCAAAATGTCATGTAACTGGTGACACTCAGCCA | |
| TTCAGCTCTCAGAGACATTGTACTAAACAACCACCTTAACACCCTGATCTGCCCTT | |
| GTTCTGATTTTACACACCAACTCTTGGGACAGAAACACCTTTTACACTTTGGAAGA | |
| ATTCTCTGCTGAAGACTTTCTATGGAACCCAGCATCATGTGGCTCAGTCTCTGATT | |
| GCCAACTCTTCCYCTTTCTTCTTCTTGAGAGAGA | |

[0283] The protein sequences resulting from the splice variants are as follows:

KChIP1.3

[0284] (The amino acid sequence derived from splice variant 3 (KChIP1.3), the underlined amino acids are coded by exon 1a.)

| | |
|---|---|
| MSGCSKRCKLGFVKFAQTIFKLITGTLSKDKIEDELEMTMVCHRPEGLEQLEAQTNFT | (SEQ ID NO: 11) |
| KRELQVLYRGFKNECPSGVVNEDTFKQIYAQFFPHGDASTYAHYLFNAFDTTQTGSV | |
| KFEDFVTALSILLRGTVHEKLRWTFNLYDINKDGYINKEEMMDIVKAIYDMMGKYTY | |
| PVLKEDTPRQHVDVFFQKMDKNKDGIVTLDEFLESCQEDDNIMRSLQLFQNVM | |

KChIP1.2

[0285] (The amino acid sequence derived from splice variant 2 (KChIP1.2), the underlined amino acids are coded by exon Ins-r.)

| | |
|---|---|
| MGAVMGTFSSLQTKQRRPSKDIAWWYYQYQRDKIEDELEMTMVCHRPEGLEQLEA | (SEQ ID NO: 12) |
| QTNFTKRELQVLYRGFKNECPSGVVNEDTFKQIYAQFFPHGDASTYAHYLFNAFDTT | |
| QTGSVKFEDFVTALSILLRGTVHEKLRWTFNLYDINKDGYINKEEMMDIVKAIYDMM | |
| GKYTYPVLKEDTPRQHVDVFFQKMDKNKDGIVTLDEFLESCQEDDNIMRSLQLFQNV | |
| M | |

KChIP1.4

[0286] (The amino acid sequence derived from splice variant 4 (KChIP1.4).)

| | |
|---|---|
| MVCHRPEGLEQLEAQTNFTKRELQVLYRGFKNECPSGVVNEDTFKQIYAQFFPHGDA | (SEQ ID NO: 13) |
| STYAHYLFNAFDTTQTGSVKFEDFVTALSILLRGTVHEKLRWTFNLYDINKDGYINKE | |
| EMMDIVKAIYDMMGKYTYPVLKEDTPRQHVDVFFQKMDKNKDGIVTLDEFLESCQE | |
| DDNIMRSLQLFQNVM | |

Identification of SNPs and Microsatellites

[0287] In order to identify SNPs across KChIP1, all exons of KChIP1 and their flanking regions were sequenced on 94 non-obese diabetic patients. As a consequence, 31 SNPs were identified (Table 9). Additional SNPs were identified across the gene by selecting SNPs from the public domain (US National Center for Biotechnology Information's SNP database) and designing SNP assays for them. (Table 10).

[0288] SNPs on 470 non-obese diabetics and 658 population-based controls using a method for detecting SNPs with fluorescent polarization template-directed dye-terminator incorporation (SNP-FP-TDI assay) were genotyped (Chen, X., Zehnbauer, B., Gnirke, A. & Kwok, P. Y. Proc. Natl. Acad. Sci. USA 94, 10756-10761 (1997)).

Association Study of Genes in Region B

[0289] All the genes in and around Region B (LCP2, KCNMB1, KChIP1, GABRP and RANBP17) individually for association to non-obese diabetes were tested. In the analysis of each gene, all SNPs identified, and previously typed microsatellites, in and close to that gene were included. The association analysis was carried out in the same way as the locus-wide association, i.e., using the iterative approach, searching for haplotypes, shorter than 300 kb, that showed strongest association to the disease was then completed.

[0290] The strongest association observed was for KChIP1. For KChIP1, 25 markers, 7 microsatellites and 18 SNPs, for association (Table 11) were tested. The strongest association signal was observed in the 3′-end of the gene; a three marker haplotype with a P-value=9.2×10⁻⁵, relative risk 12, and allelic frequency 3.6% and 0.3% in the patient and control cohorts, respectively. This haplotype, which extends over the last 8 exons of KChIP1, from 169.96 to 170.11 Mb, is listed in Table 4 as D1. We also observed another haplotype in the same region that showed association to non-obese diabetes, albeit less significant than D1, with a P-value=0.037, relative risk 1.69 and allelic frequency 7.8% and 4.8% in the patient and the control cohorts, respectively. This haplotype is labelled D2 in Table 4. For risk haplotypes, the corresponding population attributable risk is PAR=4.9% for D1 and PAR=4.7% for D2. However, as D1 and D2 are independent haplotypes, i.e., they do not appear jointly on the same chromosome, their population attributable risk can be added together.

TABLE 4
Table 4: Microsatellite and SNP haplotype association within KChIP1.
The two independent haplotypes D1 and D2 are located in the 3′-end
of the gene, from 169.96-170.11 Mb. Shown are results of a test of
association for non-obese diabetics vs population controls for both haplotypes
in a cohort of Icelandic diabetics (top) and a replication in a cohort
of Danish diabetics (bottom). Note that we report one-sided P-values for
the test on the Danish cohort as that is a replication of association
results previously observed in the Icelandic cohort.

| | P-Value | RR | Aff. frq. | Ctrl. frq | Haplotype |
|---|---|---|---|---|---|
| Icelandic | | | | | |
| D1 | 9.20E−05 | 12 | 0.036 | 0.003 | −4 DG5S13 C SG05S176 0 |
| | | | | | D5S625 |
| D2 | 0.037 | 1.69 | 0.078 | 0.048 | 0 DG5S124 C KCP_1152 C |
| | | | | | KCP_2649 T KCP_4976 A |
| | | | | | KCP_16152 |
| Danish | | | | | |
| D1 | 0.06 | 0.0008 | 0.001% | 0.06 | −4 DG5S13 C SG05S176 0 |
| | | | | | D5S625 |
| D2 | 0.0004 | 2.59 | 10.5% | 0.0004 | 0 DG5S124 C SG05S176 C |
| | | | | | SG05923 T SG05S187 A |
| | | | | | SG05S948 |

Replication in a Cohort of Danish Diabetics

[0291] The markers that define the two at-risk haplotypes, D1 and D2, in a cohort of 149 non-obese Danish females that have been diagnosed with diabetes and/or measured >7 mM glucose who participated in a Danish PERF (Prospective Epidemiological Risk Factors) study were typed. As controls, 346 females from the same study that answered no to a question about their diabetes status and/or measured <7 mM glucose were used.

[0292] The results of the association test for the two at-risk haplotypes, identified in the Icelandic diabetes cohort, are listed in Table 4. Both haplotypes appear in higher frequency in the non-obese Danish diabetics than in the control cohort. For haplotype D1, the association to non-obese diabetes is only marginally significant, with a one-sided P-value=0.05, and the relative risk of the at-risk haplotype is RR=3.0, somewhat less than is observed for the Icelandic non-obese diabetics. Note, however, that the estimated frequency of haplotype D1 is very low, especially in the control cohorts, hence the estimates of the relative risk are not very reliable. For haplotype D2, on the other hand, we do observe a statistically significant association with a one-sided P-value=0.002 and relative risk=2.74. Note that as the test of association of haplotypes D1 and D2 are attempts to replicate the association we have observed for Icelandic non-obese diabetics, it is appropriate to report one-sided P-values for those tests.

Additional SNP Genotyping for KChIP1

[0293] Having observed association to the 3′-end of KChIP1, both in Icelandic and Danish non-obese diabetics, 94 Icelandic individuals, ⅓ non-obese type II diabetes patients with the observed haplotype D1, ⅓ additional non-obese type II diabetes patients and ⅓ controls, were subsequently sequenced. The purpose of the sequencing was to identify additional SNPs. 725 SNPs (Table 12) were identified. Many of those SNPs were completely correlated so several redundant SNPs from further genotyping were removed. Some SNPs with very low minor allele frequencies were also ignored. Of the 725 identified SNPs plus what was originally identified, 108 were selected for further genotyping in the Icelandic cohort (Table 13).

[0294] A single-marker test of association was performed on non-obese diabetes for each of the additional SNPs typed, although none of the SNPs showed a strong association. However, it was observed that three of the SNPs, KCP_{—}197678, KCP_{—}197775 and KCP_{—}202795, increased the specificity of haplotype D2, if added to that haplotype, while still retaining most of its sensitivity. This is shown in Table 5, both for the association in the Icelandic and in the Danish cohorts. This increases the value of the at-risk haplotype as a diagnostic tool. Note that the three SNPs are very correlated to each other, with pairwise correlation coefficients D′≈0.96 and R²≈0.9, hence the association of haplotypes D3, D4 and D5 to non-obese diabetes should be considered as a single observation.

[0295] In addition to the refinement of the at-risk haplotype D2, another refinement of the at-risk haplotype was observed, consisting of three SNPs only, that was very correlated with the three at-risk haplotoypes, D3, D4 and D5, with pairwise correlation coefficients D′≈0.83 and R²≈0.59. This haplotype is included in Table 5 as D6.

TABLE 5
Table 5: Microsatellite and SNP haplotype association within KChIP1. Shown is association of
the at-risk haplotype D2, and of further refinements of that haplotype; haplotypes D3, D4 and
D5, to non-obese diabetes. This is shown both for the Icelandic and the Danish cohorts and, as
in Table 4, we report one-sided P-values for the association test in the Danish cohort. Finally,
we include the result of association to non-obese diabetes, in the Icelandic cohort, of a 3 SNP
haplotype, D6, that is strongly correlated with the at-risk haplotoypes D3, D4 and D5.

| | P-Value | RR | PAR | Aff. frq. | Ctrl. frq | Haplotype |
|---|---|---|---|---|---|---|
| Icelandic | | | | | | |
| D2 | 0.037 | 1.69 | 6.3% | 0.078 | 0.048 | 0 DG5S124 C KCP_1152 C KCP_2649 T |
| | | | | | | KCP_4976 A KCP_16152 |
| D3 | 0.022 | 2.19 | 5.5% | 0.052 | 0.024 | 0 DG5S124 C KCP_1152 C KCP_2649 T |
| | | | | | | KCP_4976 A KCP_16152 T KCP_197678 |
| D4 | 0.052 | 2.03 | 4.6% | 0.046 | 0.023 | 0 DG5S124 C KCP_1152 C KCP_2649 T |
| | | | | | | KCP_4976 A KCP_16152 T KCP_197775 |
| D5 | 0.023 | 2.14 | 5.5% | 0.052 | 0.025 | 0 DG5S124 C KCP_1152 C KCP_2649 T |
| | | | | | | KCP_4976 A KCP_16152 C KCP_202795 |
| D6 | 0.054 | 1.77 | 4.0% | 0.046 | 0.027 | A KCP_173982 C KCP_15400 C |
| | | | | | | KCP_18069 |
| Danish | | | | | | |
| D2 | 0.002* | 2.74 | 12.0% | 0.098 | 0.038 | 0 DG5S124 C KCP_1152 C KCP_2649 T |
| | | | | | | KCP_4976 A KCP_16152 |
| D3 | 0.0046* | 2.60 | 9.0% | 0.076 | 0.030 | 0 DG5S124 C KCP_1152 C KCP_2649 T |
| | | | | | | KCP_4976 A KCP_16152 T KCP_197678 |
| D4 | 0.0004* | 3.69 | 11.3% | 0.078 | 0.023 | 0 DG5S124 C KCP_1152 C KCP_2649 T |
| | | | | | | KCP_4976 A KCP_16152 T KCP_197775 |
| D5 | 0.0002* | 3.67 | 11.7% | 0.084 | 0.024 | 0 DG5S124 C KCP_1152 C KCP_2649 T |
| | | | | | | KCP_4976 A KCP_16152 C KCP_202795 |

*One-sided P-value

Allele Numbering System

[0296] SNP alleles are indicated by the letters found in the DNA sequence. In general the alleles can be references by A=0, C=1, G=2 and T=3. For microsatellite alleles, the CEPH sample (Centre d'Etudes du Polymorphisme Humain, genomics repository) is used as a reference, the lower allele of each microsatellite in this sample is set at 0 and all other alleles in other samples are numbered according in relation to this reference. Thus allele 1 is 1 bp longer than the lower allele in the CEPH sample, allele 2 is 2 bp longer than the lower allele in the CEPH sample, allele 3 is 3 bp longer than the lower allele in the CEPH sample, allele 4 is 4 bp longer than the lower allele in the CEPH sample, allele −1 is 1 bp shorter than the lower allele in the CEPH sample, allele −2 is 2 bp shorter than the lower allele in the CEPH sample, and so on.

[0297] Table 6 is shown in FIGS. 13A-13E4. The table shows the DNA sequence of the microsatellites employed for the CO₅ locus wide association (including Build 33 locations and Y=C or T; S=C or G; R=A or G; W=A or T; M=A or C; K=G or T.)

[0298] Table 7 also shown in FIGS. 13A-13X3 shows the DNA sequence of the microsatellites employed for the association studies across KChIP1 (including Build 33 locations).

TABLE 8
The Build 33 location and size of KChIP1 exons.

| EXON | START (NBCI33) | END (B33) | Size (bp) |
|---|---|---|---|
| 1a | 169716298 | 169716511 | 214 |
| UTR 1 | 169848417 | 169848523 | 107 |
| UTR 2 | 169861083 | 169861154 | 72 |
| UTR 3 | 169864589 | 169864679 | 91 |
| UTR 4 | 169867066 | 169867173 | 108 |
| 1b | 169867120 | 169867180 | 61 |
| Ins-r | 170075401 | 170075433 | 33 |
| 2 | 170081305 | 170081429 | 125 |
| 3 | 170082868 | 170082937 | 70 |
| 4 | 170084380 | 170084450 | 71 |
| 5 | 170085260 | 170085367 | 108 |
| 6 | 170095347 | 170095451 | 105 |
| 7 | 170096383 | 170096445 | 63 |
| 8 | 170098306 | 170099177 | 872 |

[0299] TABLE 9
The Build 33 location of SNPs found across KChIP1
after the first round of sequencing that was limited
to the exons and flanking sequences.

| START (B33) | MARKER | VARIATION |
|---|---|---|
| 169716197 | KCP_e1a_249924 | C/G |
| 169716300 | KCP_e1a_250027 | C/T |
| 169716322 | KCP_e1a_250049 | A/C |
| 169740666 | KNB_24222 | A/G |
| 169740703 | KNB_24259 | A/G |
| 169741172 | KNB_24728 | G/T |
| 169746339 | KNB_29895 | C/T |
| 169747941 | KNB_31497 | A/G |
| 169751742 | KNB_35298 | A/T |
| 169751814 | KNB_35370 | C/G |
| 169751843 | KNB_35399 | A/G |
| 169848476 | KCP_UTR1_382206 | C/T |
| 169848542 | KCP_UTR1_382272 | A/C |
| 169861338 | KCP_3UTR2_395068 | A/G |
| 169864750 | KCP_3UTR3_398480 | C/T |
| 169864875 | KCP_3UTR3_398605 | C/T |
| 169866182 | KCP_e1b_399912 | G/T |
| 170081292 | KCP_1152 | C/T |
| 170081464 | KCP_1324 | G/C |
| 170081473 | KCP_1333 | A/G |
| 170082789 | KCP_2649 | C/T |
| 170085097 | KCP_4957 | C/T |
| 170085116 | KCP_4976 | C/T |
| 170085151 | KCP_5011 | A/T |
| 170085191 | KCP_5051 | C/T |
| 170085217 | KCP_5077 | A/T |
| 170085342 | KCP_5202 | A/C |
| 170095344 | KCP_15204 | C/T |
| 170095540 | KCP_15400 | C/T |
| 170096292 | KCP_16152 | A/G |
| 170098209 | KCP_18069 | C/T |

[0300] Table 10 showing the DNA sequence of the SNPs identified across KChIP1 is also shown in FIGS. 13A-13X3.

TABLE 11
The Build 33 location of SNPs and microsatellites employed
for the first-pass association analysis across KChIP1.

| | | Public | | |
|---|---|---|---|---|
| Start (B33) | Marker | Alias | deCODE alias | Variation |
| 169788696 | DG5S47 | | | |
| 169794522 | DG5S1592 | | | |
| 169843903 | DG5S119 | | | |
| 169869845 | rs933656 | rs933656 | DG00AAFCS | A/G |
| 169869955 | rs2339091 | rs2339091 | DG00AAFCI | G/T |
| 169961410 | DG5S13 | | | |
| 169964087 | rs905808 | rs905808 | SG05S1212 | C/T |
| 170006645 | rs883849 | rs883849 | SG05S206 | A/G |
| 170015858 | DG5S123 | | | |
| 170037283 | rs2135046 | rs2135046 | SG05S159 | C/T |
| 170041996 | DG5S124 | | | |
| 170056955 | rs2339139 | rs2339139 | DG00AAFCR | A/G |
| 170064881 | rs329468 | rs329468 | SG05S896 | A/G |
| 170070041 | rs50057 | rs50057 | SG05S1270 | A/G |
| 170070735 | rs102685 | rs102685 | SG05S905 | C/T |
| 170073252 | rs50364 | rs50364 | DG00AAFCD | A/G |
| 170081292 | KCP_1152 | | SG05S176 | C/T |
| 170081473 | KCP_1333 | | SG05S921 | A/G |
| 170082789 | KCP_2649 | | SG05S923 | C/T |
| 170085116 | KCP_4976 | | SG05S187 | C/T |
| 170085217 | KCP_5077 | | SG05S179 | A/T |
| 170095540 | KCP_15400 | | SG05S946 | C/T |
| 170096292 | KCP_16152 | rs4868018 | SG05S948 | A/G |
| 170098209 | KCP_18069 | rs1363712 | SG05S189 | C/T |
| 170105556 | D5S625 | | | |

[0301] TABLE 12
The Build 33 location of SNPs found through sequencing
across KChIP1 (from exon 1b to exon 8).

| | Project | DECODE | SEQ PROJECT | PUBLIC | |
|---|---|---|---|---|---|
| Build 33 Pos | Pos | ALIAS | ALIAS | ALIAS | SNP |
| 169866787 | 9677 | SG05S2107 | KCP_9677 | rs6555900 | C/G |
| 169867465 | 10355 | SG05S229 | KCP_10355 | | A/T |
| 169867556 | 10446 | DG00AAHAR | KCP_10446 | | C/G |
| 169871957 | 14847 | SG05S485 | KCP_14847 | rs4867608 | A/T |
| 169872129 | 15019 | SG05S1298 | KCP_15019 | rs4867973 | A/G |
| 169872417 | 15307 | SG05S437 | KCP_15307 | | A/C |
| 169872421 | 15311 | SG05S438 | KCP_15311 | | A/T |
| 169872435 | 15325 | SG05S439 | KCP_15325 | | C/G |
| 169872949 | 15839 | SG05S440 | KCP_15839 | | A/G |
| 169873539 | 16429 | SG05S486 | KCP_16429 | | C/T |
| 169873680 | 16570 | SG05S487 | KCP_16570 | | A/G |
| 169875123 | 18013 | SG05S488 | KCP_18013 | | A/T |
| 169875568 | 18458 | SG05S1002 | KCP_18458 | rs6555901 | A/G |
| 169876302 | 19192 | SG05S489 | KCP_19192 | | A/G |
| 169878365 | 21255 | SG05S490 | KCP_21255 | | G/T |
| 169878734 | 21624 | SG05S491 | KCP_21624 | rs4867609 | A/G |
| 169879678 | 22568 | SG05S492 | KCP_22568 | | A/C |
| 169879717 | 22607 | SG05S493 | KCP_22607 | | C/T |
| 169881496 | 24386 | SG05S494 | KCP_24386 | | A/G |
| 169882681 | 25571 | SG05S495 | KCP_25571 | | A/C |
| 169883265 | 26155 | SG05S496 | KCP_26155 | rs7443451 | A/G |
| 169883333 | 26223 | SG05S497 | KCP_26223 | | C/G |
| 169883413 | 26303 | SG05S498 | KCP_26303 | | A/G |
| 169883465 | 26355 | SG05S1171 | KCP_26355 | | C/G |
| 169883518 | 26408 | SG05S499 | KCP_26408 | | A/T |
| 169883738 | 26628 | SG05S500 | KCP_26628 | | A/G |
| 169883811 | 26701 | SG05S501 | KCP_26701 | | A/G |
| 169884084 | 26974 | SG05S1172 | KCP_26974 | | C/T |
| 169884145 | 27035 | SG05S502 | KCP_27035 | | G/T |
| 169884439 | 27329 | SG05S503 | KCP_27329 | | C/T |
| 169884682 | 27572 | SG05S504 | KCP_27572 | | A/G |
| 169884707 | 27597 | DG00AAJHT | KCP_27597 | | A/G |
| 169884973 | 27863 | SG05S505 | KCP_27863 | | A/G |
| 169885005 | 27895 | SG05S506 | KCP_27895 | | A/G |
| 169888453 | 31343 | SG05S507 | KCP_31343 | rs4867975 | C/T |
| 169889433 | 32323 | SG05S60 | KCP_32323 | | C/T |
| 169889680 | 32570 | SG05S508 | KCP_32570 | | A/G |
| 169890025 | 32915 | SG05S509 | KCP_32915 | | A/G |
| 169890055 | 32945 | SG05S1173 | KCP_32945 | rs6873409 | A/G |
| 169890089 | 32979 | SG05S1174 | KCP_32979 | rs6873133 | A/C |
| 169890291 | 33181 | SG05S510 | KCP_33181 | rs6873872 | A/G |
| 169892122 | 35012 | SG05S1175 | KCP_35012 | | A/C |
| 169892332 | 35222 | SG05S511 | KCP_35222 | rs7724503 | A/G |
| 169892524 | 35414 | SG05S61 | KCP_35414 | | G/T |
| 169892619 | 35509 | SG05S512 | KCP_35509 | rs6885463 | C/T |
| 169892687 | 35577 | SG05S513 | KCP_35577 | | G/T |
| 169893157 | 36047 | SG05S514 | KCP_36047 | rs6555903 | C/T |
| 169893169 | 36059 | SG05S515 | KCP_36059 | rs6555904 | C/T |
| 169893871 | 36761 | SG05S516 | KCP_36761 | | A/C |
| 169894061 | 36951 | SG05S517 | KCP_36951 | | A/G |
| 169894358 | 37248 | SG05S518 | KCP_37248 | | C/G |
| 169895507 | 38397 | SG05S1176 | KCP_38397 | | C/T |
| 169895699 | 38589 | SG05S953 | KCP_38589 | | A/C |
| 169896322 | 39212 | SG05S519 | KCP_39212 | rs7737732 | G/T |
| 169896357 | 39247 | SG05S520 | KCP_39247 | | A/G |
| 169896369 | 39259 | SG05S521 | KCP_39259 | | A/G |
| 169896451 | 39341 | SG05S1177 | KCP_39341 | | A/G |
| 169896647 | 39537 | SG05S522 | KCP_39537 | | C/T |
| 169896750 | 39640 | SG05S523 | KCP_39640 | | A/T |
| 169896914 | 39804 | SG05S524 | KCP_39804 | | A/G |
| 169897484 | 40374 | SG05S525 | KCP_40374 | | C/T |
| 169897594 | 40484 | SG05S526 | KCP_40484 | | A/G |
| 169897621 | 40511 | SG05S527 | KCP_40511 | | C/T |
| 169897856 | 40746 | SG05S528 | KCP_40746 | | C/T |
| 169898205 | 41095 | SG05S529 | KCP_41095 | | C/T |
| 169898252 | 41142 | SG05S530 | KCP_41142 | | C/T |
| 169898371 | 41261 | SG05S531 | KCP_41261 | | A/G |
| 169899446 | 42336 | SG05S532 | KCP_42336 | | A/G |
| 169899693 | 42583 | SG05S533 | KCP_42583 | | A/G |
| 169900156 | 43046 | SG05S534 | KCP_43046 | | A/G |
| 169900425 | 43315 | SG05S1178 | KCP_43315 | | C/G |
| 169900629 | 43519 | SG05S535 | KCP_43519 | | C/T |
| 169902212 | 45102 | SG05S536 | KCP_45102 | rs2112601 | A/G |
| 169902400 | 45290 | SG05S537 | KCP_45290 | | G/T |
| 169903206 | 46096 | SG05S538 | KCP_46096 | | C/T |
| 169903615 | 46505 | SG05S539 | KCP_46505 | | C/T |
| 169903676 | 46566 | SG05S540 | KCP_46566 | | A/C |
| 169903766 | 46656 | SG05S541 | KCP_46656 | | A/C |
| 169904530 | 47420 | SG05S542 | KCP_47420 | | C/T |
| 169904757 | 47647 | SG05S543 | KCP_47647 | | A/G |
| 169906262 | 49152 | SG05S1179 | KCP_49152 | | A/G |
| 169906576 | 49466 | SG05S544 | KCP_49466 | | A/G |
| 169906846 | 49736 | SG05S545 | KCP_49736 | | A/T |
| 169907866 | 50756 | SG05S1180 | KCP_50756 | | A/G |
| 169908937 | 51827 | SG05S1181 | KCP_51827 | | C/T |
| 169909190 | 52080 | SG05S1182 | KCP_52080 | | C/T |
| 169910099 | 52989 | SG05S546 | KCP_52989 | | A/G |
| 169910133 | 53023 | SG05S547 | KCP_53023 | | C/T |
| 169911784 | 54674 | SG05S548 | KCP_54674 | | A/C |
| 169911823 | 54713 | SG05S549 | KCP_54713 | | A/C |
| 169913086 | 55976 | SG05S1183 | KCP_55976 | | A/G |
| 169913415 | 56305 | SG05S62 | KCP_56305 | | A/G |
| 169913670 | 56560 | SG05S954 | KCP_56560 | | C/T |
| 169913988 | 56878 | SG05S550 | KCP_56878 | | C/G |
| 169914731 | 57621 | SG05S551 | KCP_57621 | | A/G |
| 169914887 | 57777 | SG05S552 | KCP_57777 | | A/G |
| 169915597 | 58487 | SG05S553 | KCP_58487 | | A/G |
| 169917130 | 60020 | SG05S554 | KCP_60020 | | C/T |
| 169917579 | 60469 | SG05S555 | KCP_60469 | | A/G |
| 169917813 | 60703 | SG05S556 | KCP_60703 | | A/G |
| 169919206 | 62096 | SG05S557 | KCP_62096 | | A/G |
| 169919909 | 62799 | SG05S233 | KCP_62799 | | C/T |
| 169921008 | 63898 | SG05S558 | KCP_63898 | | A/G |
| 169921407 | 64297 | SG05S559 | KCP_64297 | | A/G |
| 169921917 | 64807 | SG05S560 | KCP_64807 | | G/T |
| 169922010 | 64900 | SG05S1184 | KCP_64900 | | A/G |
| 169922309 | 65199 | SG05S955 | KCP_65199 | | A/G |
| 169922397 | 65287 | SG05S561 | KCP_65287 | | G/T |
| 169923449 | 66339 | SG05S562 | KCP_66339 | | A/G |
| 169923611 | 66501 | SG05S563 | KCP_66501 | | A/G |
| 169924005 | 66895 | SG05S564 | KCP_66895 | | A/G |
| 169925422 | 68312 | SG05S956 | KCP_68312 | | A/C |
| 169926039 | 68929 | SG05S565 | KCP_68929 | | C/T |
| 169926454 | 69344 | SG05S566 | KCP_69344 | | A/G |
| 169926756 | 69646 | SG05S567 | KCP_69646 | | C/T |
| 169927013 | 69903 | SG05S568 | KCP_69903 | | A/G |
| 169927893 | 70783 | SG05S569 | KCP_70783 | | C/T |
| 169928063 | 70953 | SG05S570 | KCP_70953 | | A/T |
| 169928076 | 70966 | SG05S571 | KCP_70966 | | A/C |
| 169928444 | 71334 | SG05S572 | KCP_71334 | | C/T |
| 169928522 | 71412 | SG05S573 | KCP_71412 | | A/T |
| 169928555 | 71445 | SG05S1185 | KCP_71445 | | C/T |
| 169928665 | 71555 | SG05S1186 | KCP_71555 | | C/T |
| 169928700 | 71590 | SG05S1187 | KCP_71590 | | C/T |
| 169929635 | 72525 | SG05S574 | KCP_72525 | rs4269297 | A/G |
| 169929849 | 72739 | SG05S575 | KCP_72739 | | C/G |
| 169930171 | 73061 | SG05S576 | KCP_73061 | rs4867613 | C/T |
| 169930506 | 73396 | SG05S577 | KCP_73396 | | A/T |
| 169930538 | 73428 | SG05S578 | KCP_73428 | rs4867978 | A/G |
| 169930644 | 73534 | SG05S579 | KCP_73534 | rs4867979 | C/T |
| 169931073 | 73963 | SG05S580 | KCP_73963 | | C/G |
| 169931425 | 74315 | SG05S581 | KCP_74315 | | A/G |
| 169931663 | 74553 | SG05S582 | KCP_74553 | | G/T |
| 169931670 | 74560 | SG05S583 | KCP_74560 | | C/T |
| 169932137 | 75027 | SG05S584 | KCP_75027 | | C/T |
| 169932696 | 75586 | SG05S585 | KCP_75586 | rs7723669 | A/C |
| 169932998 | 75888 | SG05S586 | KCP_75888 | | C/T |
| 169933181 | 76071 | SG05S587 | KCP_76071 | rs386758 | A/G |
| 169933212 | 76102 | SG05S588 | KCP_76102 | rs386759 | C/T |
| 169933256 | 76146 | SG05S589 | KCP_76146 | | A/G |
| 169933389 | 76279 | SG05S1188 | KCP_76279 | rs4368746 | C/T |
| 169933420 | 76310 | SG05S590 | KCP_76310 | | C/T |
| 169933699 | 76589 | SG05S591 | KCP_76589 | | C/T |
| 169933756 | 76646 | SG05S592 | KCP_76646 | | C/T |
| 169934348 | 77238 | SG05S593 | KCP_77238 | | G/T |
| 169934429 | 77319 | SG05S594 | KCP_77319 | | C/G |
| 169934556 | 77446 | SG05S595 | KCP_77446 | | C/T |
| 169934663 | 77553 | SG05S596 | KCP_77553 | | C/T |
| 169934751 | 77641 | SG05S597 | KCP_77641 | rs4242157 | A/G |
| 169934936 | 77826 | SG05S598 | KCP_77826 | | C/G |
| 169934949 | 77839 | SG05S599 | KCP_77839 | rs7735198 | A/G |
| 169935134 | 78024 | SG05S600 | KCP_78024 | rs4867981 | A/G |
| 169935240 | 78130 | SG05S601 | KCP_78130 | rs4867614 | C/T |
| 169935254 | 78144 | SG05S602 | KCP_78144 | | A/C |
| 169935713 | 78603 | SG05S603 | KCP_78603 | | C/T |
| 169935892 | 78782 | SG05S604 | KCP_78782 | | A/G |
| 169935939 | 78829 | SG05S605 | KCP_78829 | | A/G |
| 169935989 | 78879 | SG05S606 | KCP_78879 | | C/T |
| 169936272 | 79162 | SG05S607 | KCP_79162 | | C/T |
| 169936275 | 79165 | SG05S608 | KCP_79165 | | C/T |
| 169936329 | 79219 | SG05S609 | KCP_79219 | | G/T |
| 169936495 | 79385 | SG05S610 | KCP_79385 | rs6876518 | C/T |
| 169936910 | 79800 | SG05S611 | KCP_79800 | | C/G |
| 169937029 | 79919 | SG05S1189 | KCP_79919 | | A/G |
| 169937270 | 80160 | SG05S612 | KCP_80160 | | A/G |
| 169937896 | 80786 | SG05S613 | KCP_80786 | | A/G |
| 169938126 | 81016 | SG05S614 | KCP_81016 | | C/T |
| 169938400 | 81290 | SG05S615 | KCP_81290 | | A/G |
| 169938894 | 81784 | SG05S1190 | KCP_81784 | | A/G |
| 169939578 | 82468 | SG05S957 | KCP_82468 | rs4242158 | A/G |
| 169940311 | 83201 | SG05S616 | KCP_83201 | | C/T |
| 169940995 | 83885 | SG05S617 | KCP_83885 | | A/G |
| 169941106 | 83996 | SG05S618 | KCP_83996 | rs4867615 | A/G |
| 169941897 | 84787 | SG05S1191 | KCP_84787 | | A/T |
| 169942667 | 85557 | SG05S619 | KCP_85557 | | A/G |
| 169942775 | 85665 | SG05S620 | KCP_85665 | rs6892193 | C/T |
| 169942903 | 85793 | SG05S958 | KCP_85793 | rs6892514 | C/T |
| 169943046 | 85936 | SG05S621 | KCP_85936 | | A/G |
| 169943817 | 86707 | SG05S622 | KCP_86707 | | A/T |
| 169944237 | 87127 | SG05S623 | KCP_87127 | rs6881347 | C/G |
| 169945487 | 88377 | SG05S624 | KCP_88377 | | C/T |
| 169945857 | 88747 | SG05S625 | KCP_88747 | | A/T |
| 169945886 | 88776 | SG05S626 | KCP_88776 | | C/T |
| 169945923 | 88813 | SG05S627 | KCP_88813 | | A/G |
| 169946380 | 89270 | SG05S628 | KCP_89270 | | A/G |
| 169946491 | 89381 | SG05S629 | KCP_89381 | rs4867983 | A/G |
| 169947228 | 90118 | SG05S630 | KCP_90118 | | A/G |
| 169947236 | 90126 | SG05S631 | KCP_90126 | | G/T |
| 169947285 | 90175 | SG05S632 | KCP_90175 | | C/T |
| 169947471 | 90361 | SG05S633 | KCP_90361 | | C/G |
| 169947529 | 90419 | SG05S634 | KCP_90419 | | C/T |
| 169947661 | 90551 | SG05S635 | KCP_90551 | | A/G |
| 169947834 | 90724 | SG05S636 | KCP_90724 | | A/G |
| 169948187 | 91077 | SG05S637 | KCP_91077 | rs6874152 | A/G |
| 169948683 | 91573 | SG05S1192 | KCP_91573 | | A/G |
| 169948703 | 91593 | SG05S1193 | KCP_91593 | | G/T |
| 169948722 | 91612 | SG05S1194 | KCP_91612 | | A/G |
| 169948755 | 91645 | SG05S1195 | KCP_91645 | | C/T |
| 169948788 | 91678 | SG05S1196 | KCP_91678 | | A/G |
| 169948798 | 91688 | SG05S1197 | KCP_91688 | | C/T |
| 169948977 | 91867 | SG05S638 | KCP_91867 | | C/T |
| 169949063 | 91953 | SG05S639 | KCP_91953 | | C/T |
| 169949229 | 92119 | SG05S640 | KCP_92119 | | C/T |
| 169949277 | 92167 | SG05S641 | KCP_92167 | | A/T |
| 169949352 | 92242 | SG05S642 | KCP_92242 | | A/G |
| 169949354 | 92244 | SG05S643 | KCP_92244 | rs4867984 | A/G |
| 169949449 | 92339 | SG05S644 | KCP_92339 | | C/T |
| 169950146 | 93036 | SG05S63 | KCP_93036 | | A/G |
| 169950148 | 93038 | SG05S645 | KCP_93038 | | A/G |
| 169950333 | 93223 | SG05S646 | KCP_93223 | rs4867985 | C/T |
| 169950655 | 93545 | SG05S64 | KCP_93545 | | G/T |
| 169950703 | 93593 | SG05S1198 | KCP_93593 | | C/G |
| 169950754 | 93644 | SG05S654 | KCP_93644 | | G/T |
| 169950844 | 93734 | SG05S655 | KCP_93734 | | C/T |
| 169950855 | 93745 | SG05S656 | KCP_93745 | | G/T |
| 169950892 | 93782 | SG05S1199 | KCP_93782 | | C/G |
| 169950990 | 93880 | SG05S657 | KCP_93880 | | C/T |
| 169951245 | 94135 | SG05S1200 | KCP_94135 | | A/C |
| 169951290 | 94180 | SG05S1201 | KCP_94180 | | A/G |
| 169951422 | 94312 | SG05S658 | KCP_94312 | | A/T |
| 169951577 | 94467 | SG05S659 | KCP_94467 | | A/G |
| 169951689 | 94579 | SG05S660 | KCP_94579 | | A/G |
| 169951702 | 94592 | SG05S661 | KCP_94592 | | A/G |
| 169951831 | 94721 | SG05S662 | KCP_94721 | | C/G |
| 169951838 | 94728 | SG05S663 | KCP_94728 | | A/G |
| 169951848 | 94738 | SG05S664 | KCP_94738 | | C/T |
| 169951855 | 94745 | SG05S665 | KCP_94745 | | A/G |
| 169952144 | 95034 | SG05S1202 | KCP_95034 | | A/G |
| 169952209 | 95099 | SG05S666 | KCP_95099 | | A/C |
| 169952705 | 95595 | SG05S667 | KCP_95595 | | A/G |
| 169952838 | 95728 | SG05S670 | KCP_95728 | | A/G |
| 169952962 | 95852 | SG05S671 | KCP_95852 | | A/G |
| 169953175 | 96065 | SG05S672 | KCP_96065 | | C/G |
| 169953185 | 96075 | SG05S673 | KCP_96075 | rs4354060 | A/G |
| 169953207 | 96097 | SG05S674 | KCP_96097 | rs4374772 | C/G |
| 169953297 | 96187 | SG05S675 | KCP_96187 | | A/G |
| 169953327 | 96217 | SG05S676 | KCP_96217 | | A/G |
| 169953334 | 96224 | SG05S677 | KCP_96224 | | A/G |
| 169953426 | 96316 | SG05S678 | KCP_96316 | rs6862741 | A/G |
| 169953728 | 96618 | SG05S1203 | KCP_96618 | | C/G |
| 169953902 | 96792 | SG05S679 | KCP_96792 | rs4867987 | C/T |
| 169954134 | 97024 | SG05S680 | KCP_97024 | rs4867988 | C/T |
| 169954165 | 97055 | SG05S1204 | KCP_97055 | rs4867989 | C/T |
| 169954260 | 97150 | SG05S1205 | KCP_97150 | | A/G |
| 169954800 | 97690 | SG05S681 | KCP_97690 | rs6868698 | A/T |
| 169954954 | 97844 | DG00AAJIA | KCP_97844 | rs2202438 | A/T |
| 169955450 | 98340 | SG05S682 | KCP_98340 | | C/T |
| 169956638 | 99528 | SG05S683 | KCP_99528 | | A/C |
| 169956932 | 99822 | SG05S684 | KCP_99822 | | C/T |
| 169957089 | 99979 | SG05S685 | KCP_99979 | | A/G |
| 169957538 | 100428 | SG05S1206 | KCP_100428 | | G/T |
| 169958211 | 101101 | SG05S1207 | KCP_101101 | rs4495201 | A/G |
| 169958651 | 101541 | SG05S1208 | KCP_101541 | | A/G |
| 169958784 | 101674 | SG05S686 | KCP_101674 | | A/C |
| 169959085 | 101975 | SG05S687 | KCP_101975 | | A/G |
| 169959172 | 102062 | SG05S1209 | KCP_102062 | | A/T |
| 169959537 | 102427 | SG05S688 | KCP_102427 | | A/G |
| 169959561 | 102451 | SG05S1210 | KCP_102451 | | C/T |
| 169959860 | 102750 | SG05S1211 | KCP_102750 | | C/T |
| 169959992 | 102882 | DG00AAJIB | KCP_102882 | | C/T |
| 169961135 | 104025 | SG05S689 | KCP_104025 | rs4867990 | A/G |
| 169961268 | 104158 | SG05S690 | KCP_104158 | | G/T |
| 169961404 | 104294 | SG05S691 | KCP_104294 | rs4867991 | A/G |
| 169961971 | 104861 | SG05S692 | KCP_104861 | | A/G |
| 169962144 | 105034 | SG05S693 | KCP_105034 | | A/G |
| 169962410 | 105300 | SG05S694 | KCP_105300 | rs4242159 | A/T |
| 169962429 | 105319 | SG05S695 | KCP_105319 | rs4428429 | C/G |
| 169962889 | 105779 | SG05S696 | KCP_105779 | | A/G |
| 169962929 | 105819 | SG05S697 | KCP_105819 | | C/T |
| 169963467 | 106357 | SG05S698 | KCP_106357 | rs4867990 | A/G |
| 169963592 | 106482 | SG05S699 | KCP_106482 | | C/T |
| 169963741 | 106631 | SG05S700 | KCP_106631 | | A/G |
| 169963761 | 106651 | SG05S701 | KCP_106651 | | A/G |
| 169963827 | 106717 | SG05S702 | KCP_106717 | | A/T |
| 169964021 | 106911 | SG05S703 | KCP_106911 | rs905807 | C/G |
| 169964087 | 106977 | SG05S1212 | KCP_106977 | rs905808 | C/T |
| 169964112 | 107002 | SG05S1213 | KCP_107002 | rs905809 | C/T |
| 169964368 | 107258 | SG05S988 | KCP_107258 | rs905811 | A/G |
| 169964490 | 107380 | DG00AAJIC | KCP_107380 | | A/G |
| 169964862 | 107752 | SG05S705 | KCP_107752 | rs905812 | A/T |
| 169964998 | 107888 | SG05S706 | KCP_107888 | | A/T |
| 169965204 | 108094 | SG05S707 | KCP_108094 | | C/T |
| 169965210 | 108100 | SG05S708 | KCP_108100 | | C/T |
| 169965293 | 108183 | SG05S709 | KCP_108183 | | C/T |
| 169965384 | 108274 | SG05S710 | KCP_108274 | | C/T |
| 169965778 | 108668 | SG05S1214 | KCP_108668 | | C/T |
| 169965813 | 108703 | SG05S230 | KCP_108703 | | G/T |
| 169965814 | 108704 | SG05S711 | KCP_108704 | | A/G |
| 169965989 | 108879 | SG05S712 | KCP_108879 | | A/T |
| 169966345 | 109235 | SG05S713 | KCP_109235 | | C/G |
| 169966790 | 109680 | SG05S714 | KCP_109680 | | A/C |
| 169966813 | 109703 | SG05S715 | KCP_109703 | rs6877169 | A/G |
| 169966833 | 109723 | SG05S716 | KCP_109723 | | A/G |
| 169966856 | 109746 | SG05S718 | KCP_109746 | rs905813 | A/G |
| 169967196 | 110086 | SG05S719 | KCP_110086 | | C/T |
| 169967509 | 110399 | SG05S720 | KCP_110399 | | C/G |
| 169968134 | 111024 | SG05S721 | KCP_111024 | | A/C |
| 169968258 | 111148 | SG05S722 | KCP_111148 | rs7726675 | C/T |
| 169968588 | 111478 | SG05S723 | KCP_111478 | rs2089191 | C/G |
| 169968602 | 111492 | SG05S724 | KCP_111492 | | A/G |
| 169968614 | 111504 | SG05S725 | KCP_111504 | | C/G |
| 169969010 | 111900 | SG05S726 | KCP_111900 | | A/G |
| 169969185 | 112075 | SG05S727 | KCP_112075 | | A/G |
| 169969769 | 112659 | SG05S728 | KCP_112659 | rs4867994 | C/T |
| 169970341 | 113231 | SG05S729 | KCP_113231 | | A/G |
| 169970367 | 113257 | SG05S730 | KCP_113257 | rs4867616 | A/G |
| 169970440 | 113330 | SG05S733 | KCP_113330 | | A/G |
| 169971048 | 113938 | SG05S734 | KCP_113938 | | A/G |
| 169971464 | 114354 | SG05S736 | KCP_114354 | | A/G |
| 169971531 | 114421 | SG05S1215 | KCP_114421 | | C/T |
| 169971568 | 114458 | SG05S737 | KCP_114458 | rs2879337 | C/T |
| 169971621 | 114511 | SG05S738 | KCP_114511 | | C/T |
| 169972209 | 115099 | SG05S740 | KCP_115099 | rs1553537 | A/G |
| 169972598 | 115488 | SG05S741 | KCP_115488 | rs6870612 | C/G |
| 169973254 | 116144 | SG05S742 | KCP_116144 | rs1013922 | C/T |
| 169973325 | 116215 | SG05S743 | KCP_116215 | | A/G |
| 169973369 | 116259 | SG05S744 | KCP_116259 | | A/G |
| 169973465 | 116355 | SG05S745 | KCP_116355 | rs2089192 | A/G |
| 169974479 | 117369 | SG05S746 | KCP_117369 | rs870109 | A/T |
| 169974926 | 117816 | SG05S747 | KCP_117816 | rs1553538 | C/T |
| 169976065 | 118955 | SG05S1216 | KCP_118955 | | C/T |
| 169977940 | 120830 | SG05S748 | KCP_120830 | rs905819 | C/T |
| 169978197 | 121087 | SG05S749 | KCP_121087 | | C/T |
| 169978247 | 121137 | SG05S192 | KCP_121137 | | A/G |
| 169978339 | 121229 | SG05S193 | KCP_121229 | | C/T |
| 169978427 | 121317 | SG05S1217 | KCP_121317 | | C/T |
| 169980304 | 123194 | SG05S751 | KCP_123194 | | A/G |
| 169980403 | 123293 | SG05S752 | KCP_123293 | | A/G |
| 169980481 | 123371 | SG05S1218 | KCP_123371 | | A/G |
| 169980664 | 123554 | SG05S753 | KCP_123554 | | C/T |
| 169981035 | 123925 | SG05S1219 | KCP_123925 | | A/G |
| 169981067 | 123957 | SG05S754 | KCP_123957 | | A/G |
| 169981628 | 124518 | SG05S755 | KCP_124518 | | C/T |
| 169981632 | 124522 | SG05S756 | KCP_124522 | | G/T |
| 169981987 | 124877 | SG05S194 | KCP_124877 | rs4146511 | C/T |
| 169982473 | 125363 | SG05S757 | KCP_125363 | rs2202436 | A/T |
| 169982868 | 125758 | SG05S758 | KCP_125758 | | C/T |
| 169983196 | 126086 | SG05S195 | KCP_126086 | rs2202437 | A/G |
| 169983318 | 126208 | DG00AAJHA | KCP_126208 | | T/C |
| 169983565 | 126455 | SG05S1220 | KCP_126455 | | C/G |
| 169983591 | 126481 | SG05S759 | KCP_126481 | rs2221441 | C/G |
| 169983692 | 126582 | SG05S760 | KCP_126582 | | A/G |
| 169985824 | 128714 | SG05S1221 | KCP_128714 | | A/G |
| 169985916 | 128806 | SG05S151 | KCP_128806 | | A/G |
| 169985985 | 128875 | SG05S761 | KCP_128875 | | C/T |
| 169986162 | 129052 | SG05S763 | KCP_129052 | rs4867617 | C/G |
| 169986174 | 129064 | SG05S762 | KCP_129064 | | C/G |
| 169986189 | 129079 | SG05S764 | KCP_129079 | rs4867618 | C/T |
| 169986203 | 129093 | SG05S152 | KCP_129093 | rs4867995 | C/G |
| 169986237 | 129127 | SG05S480 | KCP_129127 | rs4867619 | A/G |
| 169986334 | 129224 | SG05S765 | KCP_129224 | rs486762 | G/T |
| 169986478 | 129368 | SG05S766 | KCP_129368 | | C/G |
| 169986579 | 129469 | SG05S181 | KCP_129469 | | A/G |
| 169986800 | 129690 | SG05S182 | KCP_129690 | rs4867996 | G/T |
| 169986957 | 129847 | SG05S767 | KCP_129847 | rs4867997 | A/G |
| 169986984 | 129874 | SG05S985 | KCP_129874 | rs4867998 | A/C |
| 169986999 | 129889 | SG05S986 | KCP_129889 | rs4867999 | A/G |
| 169987419 | 130309 | DG00AAJHB | KCP_130309 | | A/G |
| 169987667 | 130557 | SG05S196 | KCP_130557 | rs905822 | C/G |
| 169988155 | 131045 | SG05S768 | KCP_131045 | | A/G |
| 169988354 | 131244 | SG05S197 | KCP_131244 | rs905824 | A/G |
| 169988368 | 131258 | SG05S769 | KCP_131258 | rs905825 | C/T |
| 169988581 | 131471 | SG05S770 | KCP_131471 | rs905826 | A/G |
| 169988714 | 131604 | SG05S1222 | KCP_131604 | | A/G |
| 169988812 | 131702 | SG05S771 | KCP_131702 | rs905827 | C/T |
| 169988905 | 131795 | SG05S65 | KCP_131795 | rs4868001 | C/T |
| 169988964 | 131854 | SG05S153 | KCP_131854 | rs6861734 | G/T |
| 169989037 | 131927 | SG05S772 | KCP_131927 | rs6865908 | A/G |
| 169989257 | 132147 | SG05S773 | KCP_132147 | | C/T |
| 169989533 | 132423 | SG05S774 | KCP_132423 | | A/G |
| 169989704 | 132594 | SG05S775 | KCP_132594 | rs4868002 | G/T |
| 169989739 | 132629 | SG05S776 | KCP_132629 | | A/G |
| 169989787 | 132677 | SG05S154 | KCP_132677 | | A/G |
| 169990284 | 133174 | SG05S777 | KCP_133174 | | C/T |
| 169990366 | 133256 | SG05S1223 | KCP_133256 | | A/G |
| 169990548 | 133438 | SG05S778 | KCP_133438 | rs4867621 | A/G |
| 169990840 | 133730 | SG05S779 | KCP_133730 | | C/T |
| 169990962 | 133852 | SG05S780 | kcp_133852 | | A/G |
| 169991155 | 134045 | SG05S198 | KCP_134045 | | C/T |
| 169991415 | 134305 | SG05S199 | KCP_134305 | rs7737768 | C/T |
| 169991521 | 134411 | SG05S781 | KCP_134411 | rs6555907 | C/T |
| 169991729 | 134619 | SG05S1224 | KCP_134619 | | A/C |
| 169991939 | 134829 | SG05S782 | KCP_134829 | | C/T |
| 169992076 | 134966 | SG05S783 | KCP_134966 | | A/G |
| 169992155 | 135045 | SG05S784 | KCP_135045 | | A/G |
| 169992628 | 135518 | SG05S200 | KCP_135518 | rs4868003 | G/T |
| 169992821 | 135711 | SG05S785 | KCP_135711 | | G/T |
| 169993032 | 135922 | SG05S786 | KCP_135922 | | A/G |
| 169993096 | 135986 | SG05S183 | KCP_135986 | | A/G |
| 169993146 | 136036 | SG05S481 | KCP_136036 | | A/C |
| 169993585 | 136475 | SG05S787 | KCP_136475 | | C/T |
| 169994082 | 136972 | SG05S201 | KCP_136972 | rs4868004 | A/G |
| 169994770 | 137660 | SG05S202 | KCP_137660 | | A/G |
| 169995924 | 138814 | SG05S788 | KCP_138814 | | C/T |
| 169997343 | 140233 | SG05S789 | KCP_140233 | | C/T |
| 169997640 | 140530 | SG05S1225 | KCP_140530 | | A/G |
| 169998201 | 141091 | SG05S1226 | KCP_141091 | | A/G |
| 170000256 | 143146 | SG05S1227 | KCP_143146 | rs953601 | C/T |
| 170000611 | 143501 | SG05S1228 | KCP_143501 | | C/T |
| 170000722 | 143612 | SG05S66 | KCP_143612 | rs4867622 | A/G |
| 170000869 | 143759 | SG05S790 | KCP_143759 | | C/T |
| 170000983 | 143873 | SG05S1229 | KCP_143873 | | C/T |
| 170001571 | 144461 | SG05S1230 | KCP_144461 | | C/T |
| 170001578 | 144468 | SG05S1299 | KCP_144468 | rs931805 | C/T |
| 170002070 | 144960 | SG05S203 | KCP_144960 | rs2279873 | C/T |
| 170002435 | 145325 | SG05S791 | KCP_145325 | rs6891256 | C/T |
| 170002801 | 145691 | SG05S1231 | KCP_145691 | | A/G |
| 170003438 | 146328 | SG05S792 | KCP_146328 | | A/G |
| 170003572 | 146462 | SG05S793 | KCP_146462 | | G/T |
| 170003856 | 146746 | SG05S482 | KCP_146746 | | C/T |
| 170003940 | 146830 | SG05S1232 | KCP_146830 | | C/T |
| 170004075 | 146965 | SG05S794 | KCP_146965 | | C/T |
| 170004199 | 147089 | SG05S1233 | KCP_147089 | | C/G |
| 170004733 | 147623 | SG05S204 | KCP_147623 | rs2292146 | C/T |
| 170005151 | 148041 | SG05S795 | KCP_148041 | | C/T |
| 170006326 | 149216 | SG05S205 | KCP_149216 | rs6555908 | A/G |
| 170006485 | 149375 | SG05S796 | KCP_149375 | rs883848 | G/T |
| 170006645 | 149535 | SG05S206 | KCP_149535 | rs883849 | A/G |
| 170006910 | 149800 | SG05S1234 | KCP_149800 | | A/G |
| 170007023 | 149913 | SG05S797 | KCP_149913 | rs4867623 | C/T |
| 170007516 | 150406 | SG05S798 | KCP_150406 | rs4868005 | G/T |
| 170007640 | 150530 | SG05S987 | KCP_150530 | | C/T |
| 170007808 | 150698 | SG05S799 | KCP_150698 | | G/T |
| 170007921 | 150811 | SG05S155 | KCP_150811 | | A/G |
| 170008215 | 151105 | SG05S800 | KCP_151105 | | G/T |
| 170008937 | 151827 | SG05S801 | KCP_151827 | rs2339094 | A/G |
| 170009218 | 152108 | SG05S1235 | KCP_152108 | | A/G |
| 170009587 | 152477 | SG05S802 | KCP_152477 | | C/T |
| 170009592 | 152482 | SG05S803 | KCP_152482 | | A/C |
| 170010385 | 153275 | SG05S1236 | KCP_153275 | rs6866371 | C/T |
| 170010518 | 153408 | SG05S1237 | KCP_153408 | | C/T |
| 170010943 | 153833 | SG05S804 | KCP_153833 | | C/T |
| 170011041 | 153931 | DG00AAJHC | KCP_153931 | rs2879338 | A/G |
| 170011269 | 154159 | SG05S805 | KCP_154159 | | A/G |
| 170011475 | 154365 | SG05S1238 | KCP_154365 | | A/G |
| 170011963 | 154853 | SG05S806 | KCP_154853 | | C/T |
| 170012367 | 155257 | SG05S807 | KCP_155257 | | C/G |
| 170013726 | 156616 | SG05S808 | KCP_156616 | | C/T |
| 170013842 | 156732 | SG05S207 | KCP_156732 | rs924876 | A/T |
| 170015154 | 158044 | SG05S809 | KCP_158044 | | A/G |
| 170015582 | 158472 | SG05S810 | KCP_158472 | | C/T |
| 170015603 | 158493 | SG05S811 | KCP_158493 | | A/G |
| 170015680 | 158570 | SG05S812 | KCP_158570 | | C/T |
| 170015727 | 158617 | SG05S67 | KCP_158617 | rs2036559 | C/T |
| 170016200 | 159090 | SG05S813 | KCP_159090 | rs6889236 | A/G |
| 170016255 | 159145 | SG05S814 | KCP_159145 | | A/G |
| 170016259 | 159149 | SG05S815 | KCP_159149 | | C/T |
| 170016791 | 159681 | SG05S1239 | KCP_159681 | | A/G |
| 170016798 | 159688 | SG05S1240 | KCP_159688 | | A/G |
| 170017255 | 160145 | SG05S208 | KCP_160145 | | A/G |
| 170017524 | 160414 | SG05S816 | KCP_160414 | | G/T |
| 170018297 | 161187 | SG05S817 | KCP_161187 | | A/G |
| 170018356 | 161246 | SG05S818 | KCP_161246 | | C/G |
| 170018549 | 161439 | SG05S819 | KCP_161439 | | A/G |
| 170018573 | 161463 | SG05S820 | KCP_161463 | | C/T |
| 170019258 | 162148 | SG05S821 | KCP_162148 | | C/T |
| 170019314 | 162204 | SG05S1241 | KCP_162204 | | A/C |
| 170019379 | 162269 | SG05S822 | KCP_162269 | | A/T |
| 170019414 | 162304 | SG05S823 | KCP_162304 | | C/G |
| 170019958 | 162848 | SG05S824 | KCP_162848 | | C/G |
| 170020197 | 163087 | SG05S825 | KCP_163087 | rs6871693 | C/G |
| 170020606 | 163496 | SG05S826 | KCP_163496 | | A/G |
| 170020870 | 163760 | SG05S827 | KCP_163760 | | A/G |
| 170021444 | 164334 | SG05S1242 | KCP_164334 | | A/G |
| 170022007 | 164897 | SG05S209 | KCP_164897 | | A/G |
| 170022125 | 165015 | SG05S828 | KCP_165015 | | G/T |
| 170022343 | 165233 | SG05S1243 | KCP_165233 | | C/T |
| 170022545 | 165435 | SG05S1244 | KCP_165435 | | C/T |
| 170023275 | 166165 | SG05S829 | KCP_166165 | | A/G |
| 170024034 | 166924 | SG05S1245 | KCP_166924 | rs4867624 | C/T |
| 170024668 | 167558 | SG05S830 | KCP_167558 | | A/G |
| 170025753 | 168643 | SG05S1246 | KCP_168643 | | A/G |
| 170025970 | 168860 | SG05S1247 | KCP_168860 | rs2202439 | C/G |
| 170026021 | 168911 | SG05S1248 | KCP_168911 | | A/G |
| 170026162 | 169052 | SG05S1249 | KCP_169052 | | A/G |
| 170026344 | 169234 | SG05S156 | KCP_169234 | | A/G |
| 170028032 | 170922 | SG05S1297 | KCP_170922 | rs4868008 | A/C |
| 170028055 | 170945 | SG05S831 | KCP_170945 | | C/G |
| 170028163 | 171053 | SG05S1250 | KCP_171053 | rs4868009 | A/G |
| 170028303 | 171193 | SG05S1300 | KCP_171193 | rs4868010 | G/T |
| 170028752 | 171642 | SG05S1251 | KCP_171642 | | G/T |
| 170028987 | 171877 | SG05S832 | KCP_171877 | | A/G |
| 170030482 | 173372 | SG05S833 | KCP_173372 | | A/G |
| 170030815 | 173705 | SG05S834 | KCP_173705 | | C/T |
| 170030958 | 173848 | SG05S210 | KCP_173848 | | A/G |
| 170030986 | 173876 | SG05S1252 | KCP_173876 | | C/T |
| 170031092 | 173982 | SG05S157 | KCP_173982 | rs6875696 | A/C |
| 170031149 | 174039 | SG05S835 | KCP_174039 | | C/T |
| 170031150 | 174040 | SG05S836 | KCP_174040 | | A/G |
| 170031353 | 174243 | DG00AAJHF | KCP_174243 | | A/G |
| 170031709 | 174599 | SG05S837 | KCP_174599 | | C/T |
| 170031812 | 174702 | SG05S838 | KCP_174702 | | C/T |
| 170031962 | 174852 | SG05S839 | KCP_174852 | | A/G |
| 170031972 | 174862 | SG05S840 | KCP_174862 | rs4628005 | G/T |
| 170032216 | 175106 | SG05S158 | KCP_175106 | rs2339095 | C/G |
| 170032280 | 175170 | SG05S211 | KCP_175170 | rs6555910 | A/G |
| 170032361 | 175251 | SG05S841 | KCP_175251 | | C/T |
| 170032362 | 175252 | DG00AAJHG | KCP_175252 | rs7721722 | A/G |
| 170032610 | 175500 | SG05S842 | KCP_175500 | | A/G |
| 170032814 | 175704 | SG05S843 | KCP_175704 | | A/G |
| 170033021 | 175911 | SG05S844 | KCP_175911 | | A/G |
| 170033923 | 176813 | SG05S845 | KCP_176813 | | A/G |
| 170033946 | 176836 | DG00AAJHH | KCP_176836 | | A/G |
| 170034620 | 177510 | SG05S184 | KCP_177510 | rs4868011 | A/C |
| 170034720 | 177610 | SG05S1253 | KCP_177610 | | G/T |
| 170034980 | 177870 | SG05S846 | KCP_177870 | | G/T |
| 170035009 | 177899 | SG05S847 | KCP_177899 | rs4868012 | C/T |
| 170036929 | 179819 | SG05S848 | KCP_179819 | | C/T |
| 170037010 | 179900 | SG05S1254 | KCP_179900 | | G/T |
| 170037283 | 180173 | SG05S159 | KCP_180173 | rs2135046 | C/T |
| 170037347 | 180237 | SG05S212 | KCP_180237 | rs2135047 | C/G |
| 170038967 | 181857 | SG05S1255 | KCP_181857 | | C/T |
| 170039237 | 182127 | SG05S1256 | KCP_182127 | | C/T |
| 170039419 | 182309 | SG05S849 | KCP_182309 | | A/T |
| 170041190 | 184080 | SG05S160 | KCP_184080 | rs2292147 | C/G |
| 170041385 | 184275 | SG05S964 | KCP_184275 | | A/G |
| 170042689 | 185579 | DG00AAJDX | KCP_185579 | | C/A |
| 170043158 | 186048 | SG05S213 | KCP_186048 | | A/G |
| 170043789 | 186679 | SG05S161 | KCP_186679 | | C/G |
| 170043953 | 186843 | SG05S850 | KCP_186843 | | A/C |
| 170043997 | 186887 | SG05S965 | KCP_186887 | | C/T |
| 170044226 | 187116 | DG00AAJDY | KCP_187116 | | A/G |
| 170044277 | 187167 | SG05S851 | KCP_187167 | | C/G |
| 170044368 | 187258 | SG05S162 | KCP_187258 | | G/T |
| 170044661 | 187551 | SG05S853 | KCP_187551 | | A/G |
| 170044798 | 187688 | DG00AAJDZ | KCP_187688 | | T/A |
| 170044904 | 187794 | SG05S966 | KCP_187794 | | C/T |
| 170045075 | 187965 | SG05S967 | KCP_187965 | | C/T |
| 170046043 | 188933 | SG05S968 | KCP_188933 | | C/T |
| 170046441 | 189331 | SG05S214 | KCP_189331 | | A/G |
| 170047120 | 190010 | SG05S854 | KCP_190010 | rs2221442 | A/G |
| 170047129 | 190019 | SG05S855 | KCP_190019 | | C/G |
| 170048070 | 190960 | SG05S856 | KCP_190960 | | C/G |
| 170048074 | 190964 | SG05S857 | KCP_190964 | | C/T |
| 170048090 | 190980 | SG05S858 | KCP_190980 | | C/G |
| 170048315 | 191205 | SG05S859 | KCP_191205 | rs4868015 | C/T |
| 170048733 | 191623 | SG05S860 | KCP_191623 | | A/G |
| 170049238 | 192128 | SG05S990 | KCP_192128 | | C/T |
| 170049852 | 192742 | DG00AAJEB | KCP_192742 | rs1973529 | T/C |
| 170050303 | 193193 | DG00AAJEC | KCP_193193 | | G/A |
| 170051066 | 193956 | SG05S163 | KCP_193956 | rs2202440 | C/T |
| 170051438 | 194328 | SG05S861 | KCP_194328 | | A/T |
| 170051462 | 194352 | SG05S862 | KCP_194352 | | A/G |
| 170051726 | 194616 | DG00AAJEE | KCP_194616 | rs2036560 | T/C |
| 170051899 | 194789 | SG05S970 | KCP_194789 | | C/T |
| 170052012 | 194902 | SG05S863 | KCP_194902 | | A/G |
| 170052171 | 195061 | SG05S971 | KCP_195061 | | G/T |
| 170052988 | 195878 | SG05S864 | KCP_195878 | | C/T |
| 170053658 | 196548 | DG00AAJEF | KCP_196548 | | A/G |
| 170053669 | 196559 | SG05S865 | KCP_196559 | rs7702368 | A/G |
| 170053840 | 196730 | SG05S866 | KCP_196730 | | G/T |
| 170053939 | 196829 | SG05S867 | KCP_196829 | | C/G |
| 170054581 | 197471 | SG05S972 | KCP_197471 | | A/G |
| 170054620 | 197510 | SG05S973 | KCP_197510 | | C/T |
| 170054788 | 197678 | DG00AAJEG | KCP_197678 | rs962804 | T/C |
| 170054803 | 197693 | SG05S884 | KCP_197693 | | A/G |
| 170054885 | 197775 | DG00AAJEH | KCP_197775 | | C/T |
| 170055781 | 198671 | DG00AAJEI | KCP_198671 | | A/G |
| 170055957 | 198847 | SG05S974 | KCP_198847 | | A/G |
| 170056043 | 198933 | DG00AAJEJ | KCP_198933 | | G/A |
| 170056137 | 199027 | SG05S975 | KCP_199027 | | A/G |
| 170056475 | 199365 | DG00AAJEK | KCP_199365 | rs6555911 | A/G |
| 170056516 | 199406 | SG05S164 | KCP_199406 | rs6887777 | A/T |
| 170056578 | 199468 | SG05S1257 | KCP_199468 | | C/T |
| 170057283 | 200173 | SG05S165 | KCP_200173 | | C/G |
| 170057351 | 200241 | DG00AAJEL | KCP_200241 | | A/G |
| 170057605 | 200495 | SG05S976 | KCP_200495 | | A/G |
| 170057933 | 200823 | SG05S991 | KCP_200823 | | A/C |
| 170058193 | 201083 | SG05S992 | KCP_201083 | rs4464713 | C/T |
| 170058699 | 201589 | SG05S885 | KCP_201589 | | C/T |
| 170059095 | 201985 | DG00AAJEM | KCP_201985 | | G/A |
| 170059177 | 202067 | DG00AAJEN | KCP_202067 | rs2221440 | A/G |
| 170059203 | 202093 | SG05S977 | KCP_202093 | | A/C |
| 170059905 | 202795 | DG00AAJEO | KCP_202795 | rs875184 | C/T |
| 170060219 | 203109 | SG05S1258 | KCP_203109 | | A/G |
| 170060292 | 203182 | SG05S978 | KCP_203182 | | A/G |
| 170060393 | 203283 | SG05S979 | KCP_203283 | rs905818 | A/G |
| 170061018 | 203908 | SG05S980 | KCP_203908 | rs905817 | C/T |
| 170061292 | 204182 | SG05S981 | KCP_204182 | rs872435 | G/T |
| 170061352 | 204242 | SG05S166 | KCP_204242 | rs6897344 | C/T |
| 170061419 | 204309 | SG05S982 | KCP_204309 | | A/G |
| 170061618 | 204508 | SG05S983 | KCP_204508 | rs872436 | A/G |
| 170061670 | 204560 | SG05S1259 | KCP_204560 | | A/G |
| 170061727 | 204617 | SG05S984 | KCP_204617 | rs6876574 | C/T |
| 170061799 | 204689 | SG05S1260 | KCP_204689 | rs905816 | G/T |
| 170061809 | 204699 | SG05S1261 | KCP_204699 | | A/T |
| 170061845 | 204735 | SG05S1262 | KCP_204735 | rs905815 | C/T |
| 170062696 | 205586 | SG05S886 | KCP_205586 | rs329466 | C/T |
| 170062747 | 205637 | SG05S887 | KCP_205637 | rs7721804 | A/C |
| 170062756 | 205646 | SG05S888 | KCP_205646 | rs329467 | C/T |
| 170062777 | 205667 | SG05S889 | KCP_205667 | rs7721817 | A/G |
| 170062940 | 205830 | SG05S167 | KCP_205830 | | C/T |
| 170062950 | 205840 | SG05S890 | KCP_205840 | | A/G |
| 170063305 | 206195 | SG05S891 | KCP_206195 | | C/G |
| 170063313 | 206203 | SG05S892 | KCP_206203 | | C/T |
| 170063377 | 206267 | SG05S168 | KCP_206267 | | A/G |
| 170063732 | 206622 | SG05S893 | KCP_206622 | rs7727631 | A/G |
| 170063817 | 206707 | SG05S894 | KCP_206707 | | C/T |
| 170063983 | 206873 | SG05S1263 | KCP_206873 | rs7710016 | A/T |
| 170064013 | 206903 | SG05S1264 | KCP_206903 | | C/G |
| 170064648 | 207538 | SG05S895 | KCP_207538 | | C/T |
| 170064760 | 207650 | SG05S969 | KCP_207650 | | A/G |
| 170064771 | 207661 | SG05S169 | KCP_207661 | | C/G |
| 170064881 | 207771 | SG05S896 | KCP_207771 | rs329468 | A/G |
| 170065075 | 207965 | SG05S170 | KCP_207965 | | C/T |
| 170065694 | 208584 | SG05S171 | KCP_208584 | | A/G |
| 170065711 | 208601 | SG05S232 | KCP_208601 | rs329469 | A/C |
| 170065715 | 208605 | SG05S897 | KCP_208605 | | A/G |
| 170065740 | 208630 | SG05S172 | KCP_208630 | | C/T |
| 170065834 | 208724 | SG05S1265 | KCP_208724 | rs7700434 | C/T |
| 170066123 | 209013 | SG05S1266 | KCP_209013 | rs7734240 | C/T |
| 170066260 | 209150 | SG05S1267 | KCP_209150 | | A/G |
| 170067967 | 210857 | SG05S898 | KCP_210857 | rs2194162 | A/G |
| 170068018 | 210908 | SG05S899 | KCP_210908 | | C/G |
| 170068420 | 211310 | SG05S900 | KCP_211310 | | A/G |
| 170068510 | 211400 | SG05S901 | KCP_211400 | rs410348 | A/G |
| 170068614 | 211504 | SG05S902 | KCP_211504 | | A/G |
| 170068635 | 211525 | SG05S173 | KCP_211525 | | A/G |
| 170068731 | 211621 | SG05S903 | KCP_211621 | | A/G |
| 170068759 | 211649 | SG05S1268 | KCP_211649 | | G/T |
| 170068960 | 211850 | SG05S185 | KCP_211850 | rs329470 | C/T |
| 170069885 | 212775 | SG05S186 | KCP_212775 | rs4349730 | A/G |
| 170070003 | 212893 | SG05S1269 | KCP_212893 | rs6877532 | G/T |
| 170070041 | 212931 | SG05S1270 | KCP_212931 | rs50057 | A/G |
| 170070593 | 213483 | SG05S904 | KCP_213483 | | A/G |
| 170070700 | 213590 | SG05S1271 | KCP_213590 | rs102684 | C/T |
| 170070735 | 213625 | SG05S905 | KCP_213625 | rs102685 | C/T |
| 170070768 | 213658 | SG05S1272 | KCP_213658 | rs102686 | A/G |
| 170071584 | 214474 | SG05S1273 | KCP_214474 | rs329471 | C/G |
| 170071665 | 214555 | SG05S1274 | KCP_214555 | rs329472 | C/T |
| 170071715 | 214605 | SG05S1275 | KCP_214605 | rs329473 | C/G |
| 170072023 | 214913 | SG05S1276 | KCP_214913 | | A/G |
| 170072363 | 215253 | SG05S906 | KCP_215253 | rs4041562 | C/T |
| 170072373 | 215263 | SG05S907 | KCP_215263 | rs172944 | C/T |
| 170072484 | 215374 | SG05S908 | KCP_215374 | | A/G |
| 170072485 | 215375 | SG05S909 | KCP_215375 | | A/G |
| 170072562 | 215452 | SG05S910 | KCP_215452 | rs191297 | A/G |
| 170072712 | 215602 | SG05S1277 | KCP_215602 | rs186646 | A/C |
| 170072813 | 215703 | SG05S174 | KCP_215703 | | A/C |
| 170073179 | 216069 | SG05S1278 | KCP_216069 | | C/T |
| 170073555 | 216445 | SG05S1279 | KCP_216445 | rs1363709 | A/G |
| 170073565 | 216455 | SG05S1280 | KCP_216455 | rs329474 | C/G |
| 170074202 | 217092 | SG05S993 | KCP_217092 | rs984559 | A/G |
| 170074303 | 217193 | SG05S994 | KCP_217193 | | C/T |
| 170074359 | 217249 | SG05S995 | KCP_217249 | rs329475 | A/G |
| 170075932 | 218822 | SG05S996 | KCP_218822 | | A/G |
| 170076291 | 219181 | SG05S997 | KCP_219181 | | A/G |
| 170076439 | 219329 | SG05S998 | KCP_219329 | rs801987 | C/G |
| 170077257 | 220147 | SG05S911 | KCP_220147 | | A/T |
| 170078779 | 221669 | SG05S912 | KCP_221669 | | C/G |
| 170078881 | 221771 | SG05S1281 | KCP_221771 | | C/T |
| 170078909 | 221799 | DG00AAJHJ | KCP_221799 | rs7733559 | A/T |
| 170078966 | 221856 | SG05S913 | KCP_221856 | rs7713498 | C/T |
| 170079102 | 221992 | SG05S1282 | KCP_221992 | | C/T |
| 170079170 | 222060 | SG05S175 | KCP_222060 | | C/T |
| 170079176 | 222066 | SG05S1283 | KCP_222066 | | A/T |
| 170079986 | 222876 | SG05S1284 | KCP_222876 | | A/G |
| 170080026 | 222916 | SG05S914 | KCP_222916 | | C/T |
| 170080378 | 223268 | SG05S915 | KCP_223268 | rs4868017 | C/T |
| 170080480 | 223370 | SG05S916 | KCP_223370 | | C/T |
| 170080678 | 223568 | SG05S917 | KCP_223568 | | G/T |
| 170080917 | 223807 | SG05S918 | KCP_223807 | | C/G |
| 170081127 | 224017 | SG05S919 | KCP_224017 | rs6555913 | A/G |
| 170081263 | 224153 | SG05S1285 | KCP_224153 | | G/T |
| 170081464 | 224354 | SG05S920 | KCP_224354 | | C/G |
| 170081779 | 224669 | SG05S231 | KCP_224669 | | A/C |
| 170082330 | 225220 | SG05S177 | KCP_225220 | | A/G |
| 170082361 | 225251 | SG05S1286 | KCP_225251 | | A/T |
| 170082496 | 225386 | SG05S922 | KCP_225386 | | C/T |
| 170083131 | 226021 | SG05S1287 | KCP_226021 | | A/C |
| 170083226 | 226116 | SG05S1288 | KCP_226116 | | C/G |
| 170083558 | 226448 | SG05S924 | KCP_226448 | | A/G |
| 170083941 | 226831 | SG05S925 | KCP_226831 | | A/G |
| 170084576 | 227466 | SG05S926 | KCP_227466 | | C/T |
| 170084823 | 227713 | SG05S927 | KCP_227713 | | A/G |
| 170084981 | 227871 | SG05S178 | KCP_227871 | | C/G |
| 170085097 | 227987 | SG05S483 | KCP_227987 | rs2277951 | C/T |
| 170085116 | 228006 | SG05S187 | KCP_228006 | rs2277952 | C/T |
| 170085151 | 228041 | SG05S928 | KCP_228041 | | A/T |
| 170085191 | 228081 | SG05S929 | KCP_228081 | | C/T |
| 170085217 | 228107 | SG05S179 | KCP_228107 | | A/T |
| 170085834 | 228724 | SG05S1289 | KCP_228724 | | A/G |
| 170086059 | 228949 | SG05S999 | KCP_228949 | | C/T |
| 170086143 | 229033 | SG05S1000 | KCP_229033 | | C/T |
| 170086250 | 229140 | SG05S1001 | KCP_229140 | | C/T |
| 170086709 | 229599 | SG05S930 | KCP_229599 | | A/C |
| 170086826 | 229716 | SG05S931 | KCP_229716 | | C/T |
| 170087721 | 230611 | SG05S932 | KCP_230611 | rs6894038 | C/G |
| 170087734 | 230624 | SG05S933 | KCP_230624 | rs6894316 | A/G |
| 170087780 | 230670 | SG05S934 | KCP_230670 | rs6875006 | G/T |
| 170087950 | 230840 | SG05S1290 | KCP_230840 | | A/G |
| 170088932 | 231822 | SG05S1291 | KCP_231822 | rs1422978 | C/T |
| 170089182 | 232072 | SG05S1292 | KCP_232072 | rs2194160 | C/T |
| 170089631 | 232521 | SG05S1293 | KCP_232521 | rs1592987 | A/T |
| 170090569 | 233459 | SG05S935 | KCP_233459 | rs6870201 | A/G |
| 170090765 | 233655 | SG05S989 | KCP_233655 | rs2032863 | A/G |
| 170091557 | 234447 | SG05S936 | KCP_234447 | rs6876375 | A/G |
| 170091681 | 234571 | SG05S937 | KCP_234571 | | C/T |
| 170091700 | 234590 | SG05S938 | KCP_234590 | | A/T |
| 170092075 | 234965 | SG05S939 | KCP_234965 | | C/T |
| 170092275 | 235165 | SG05S940 | KCP_235165 | rs1363710 | G/T |
| 170092318 | 235208 | SG05S941 | KCP_235208 | rs1363711 | A/G |
| 170092468 | 235358 | SG05S942 | KCP_235358 | | A/G |
| 170093047 | 235937 | SG05S1294 | KCP_235937 | | A/C |
| 170093362 | 236252 | SG05S943 | KCP_236252 | | A/T |
| 170094119 | 237009 | SG05S1295 | KCP_237009 | | A/G |
| 170094581 | 237471 | SG05S944 | KCP_237471 | rs1422979 | A/G |
| 170094615 | 237505 | SG05S188 | KCP_237505 | rs4867628 | C/T |
| 170094780 | 237670 | SG05S1296 | KCP_237670 | | G/T |
| 170095344 | 238234 | SG05S945 | KCP_238234 | | C/T |
| 170095662 | 238552 | SG05S947 | KCP_238552 | | C/T |
| 170095701 | 238591 | SG05S180 | KCP_238591 | | C/T |
| 170096774 | 239664 | SG05S949 | KCP_239664 | | C/G |
| 170097477 | 240367 | SG05S950 | KCP_240367 | rs6879997 | C/G |
| 170098637 | 241527 | SG05S190 | KCP_241527 | rs1363713 | G/T |
| 170098914 | 241804 | SG05S191 | KCP_241804 | rs1055381 | C/T |
| 170099451 | 242341 | SG05S951 | KCP_242341 | rs1363714 | A/G |
| 170099467 | 242357 | SG05S952 | KCP_242357 | rs6872337 | G/T |
| 170106814 | | SG05S1608 | SG05S1608 | rs1544762 | G/T |
| 170106833 | | SG05S1609 | SG05S1609 | | C/T |
| 170106887 | | SG05S1610 | SG05S1610 | | A/C |

[0302] TABLE 13
The Build 33 location of SNPs and microsatellites employed
for the subsequent association analysis across KChIP1.

| | | | | Vari- |
|---|---|---|---|---|
| Start (B33) | Marker | Public alias | deCODE alias | ation |
| 169477886 | rs1895301 | rs1895301 | SG05S2143 | C/T |
| 169500972 | rs1422752 | rs1422752 | SG05S1616 | C/T |
| 169518355 | rs1422754 | rs1422754 | SG05S1617 | A/G |
| 169653708 | DG5S1173 | | | |
| 169661202 | DG5S44 | | | |
| 169673519 | SG05S872 | rs6881730 | SG05S872 | A/G |
| 169678485 | SG05S873 | rs925080 | SG05S873 | A/G |
| 169693772 | DG5S45 | | | |
| 169696877 | KCP_rs315773 | rs315773 | SG05S76 | A/G |
| 169702377 | DG5S46 | | | |
| 169705506 | SG05S876 | rs315757 | SG05S876 | A/G |
| 169709736 | KCP_rs952767 | rs952767 | SG05S79 | G/T |
| 169740666 | KNB_24222 | rs314155 | SG05S1611 | A/G |
| 169740703 | KNB_24259 | | DG00AAIGF | A/G |
| 169741172 | KNB_24728 | rs2656842 | DG00AAIGG | G/T |
| 169745438 | DG5S1178 | | | |
| 169746339 | KNB_29895 | | DG00AAIGH | C/T |
| 169747941 | KNB_31497 | | DG00AAIGI | A/G |
| 169751742 | KNB_35298 | rs2075612 | DG00AAIGZ | A/T |
| 169751814 | KNB_35370 | | DG00AAIHA | C/G |
| 169751843 | KNB_35399 | rs703508 | DG00AAIHB | A/G |
| 169753660 | KCP_rs314129 | rs314129 | SG05S83 | C/T |
| 169782203 | KCP_rs183398 | rs183398 | SG05S87 | C/T |
| 169788696 | DG5S47 | | | |
| 169794522 | DG5S1592 | | | |
| 169815996 | rs1032856 | rs1032856 | SG05S96 | C/G |
| 169833941 | rs2055606 | rs2055606 | SG05S1621 | C/T |
| 169843903 | DG5S119 | | | |
| 169859275 | KCP_rs888934 | rs888934 | SG05S93 | A/G |
| 169867465 | KCP_10355 | | SG05S229 | A/T |
| 169867556 | KCP_10446 | | DG00AAHAR | C/G |
| 169869845 | rs933656 | rs933656 | DG00AAFCS | A/G |
| 169869955 | rs2339091 | rs2339091 | DG00AAFCI | G/T |
| 169890996 | rs1862331 | rs1862331 | DG00AAFCL | C/T |
| 169895699 | KCP_38589 | | SG05S953 | A/C |
| 169922309 | KCP_65199 | | SG05S955 | A/G |
| 169939578 | KCP_82468 | rs4242158 | SG05S957 | A/G |
| 169942903 | KCP_85793 | rs6892514 | SG05S958 | C/T |
| 169950655 | KCP_93545 | | SG05S64 | G/T |
| 169951970 | DG5S955 | | | |
| 169954954 | KCP_97844 | rs2202438 | DG00AAJIA | A/T |
| 169959992 | KCP_102882 | | DG00AAJIB, | C/T |
| | | | SG05S2479 | |
| 169961410 | DG5S13 | | | |
| 169964490 | KCP_107380 | | DG00AAJIC | A/G |
| 169965813 | KCP_108703 | | SG05S230 | G/T |
| 169981987 | KCP_124877 | rs4146511 | SG05S194 | C/T |
| 169983196 | KCP_126086 | rs2202437 | SG05S195 | A/G |
| 169983318 | KCP_126208 | | DG00AAJHA | T/C |
| 169986203 | KCP_129093 | rs4867995 | SG05S152 | C/G |
| 169986237 | KCP_129127 | rs4867619 | SG05S480 | A/G |
| 169986800 | KCP_129690 | rs4867996 | SG05S182 | G/T |
| 169987419 | KCP_130309 | | DG00AAJHB | A/G |
| 169987667 | KCP_130557 | rs905822 | SG05S196 | C/G |
| 169987873 | rs905823 | rs905823 | SG05S1302 | A/C |
| 169988354 | KCP_131244 | rs905824 | SG05S197 | A/G |
| 169988964 | KCP_131854 | rs6861734 | SG05S153 | G/T |
| 169989787 | KCP_132677 | | SG05S154 | A/G |
| 169991155 | KCP_134045 | | SG05S198 | C/T |
| 169992628 | KCP_135518 | rs4868003 | SG05S200 | G/T |
| 169993146 | KCP_136036 | | SG05S481 | A/C |
| 169994770 | KCP_137660 | | SG05S202 | A/G |
| 170000722 | KCP_143612 | rs4867622 | SG05S66 | A/G |
| 170002070 | KCP_144960 | rs2279873 | SG05S203 | C/T |
| 170003856 | KCP_146746 | | SG05S482 | C/T |
| 170006326 | KCP_149216 | rs6555908 | SG05S205 | A/G |
| 170006645 | KCP_149535 | rs883849 | SG05S206 | A/G |
| 170006645 | rs883849 | rs883849 | SG05S206 | A/G |
| 170013842 | KCP_156732 | rs924876 | SG05S207 | A/T |
| 170015727 | KCP_158617 | rs2036559 | SG05S67 | C/T |
| 170015858 | DG5S123 | | | |
| 170017255 | KCP_160145 | | SG05S208 | A/G |
| 170022007 | KCP_164897 | | SG05S209 | A/G |
| 170026344 | KCP_169234 | | SG05S156 | A/G |
| 170030958 | KCP_173848 | | SG05S210 | A/G |
| 170031092 | KCP_173982 | rs6875696 | SG05S157 | A/C |
| 170031353 | KCP_174243 | | DG00AAJHF | A/G |
| 170032216 | KCP_175106 | rs2339095 | SG05S158 | C/G |
| 170032280 | KCP_175170 | rs6555910 | SG05S211 | A/G |
| 170032362 | KCP_175252 | rs7721722 | DG00AAJHG | A/G |
| 170033946 | KCP_176836 | | DG00AAJHH | A/G |
| 170037283 | KCP_180173 | rs2135046 | SG05S159 | C/T |
| 170037283 | rs2135046 | rs2135046 | SG05S159 | C/T |
| 170037347 | KCP_180237 | rs2135047 | SG05S212 | C/G |
| 170041190 | KCP_184080 | rs2292147 | SG05S160 | C/G |
| 170041996 | DG5S124 | | | |
| 170042689 | KCP_185579 | | DG00AAJDX | C/A |
| 170043158 | KCP_186048 | | SG05S213 | A/G |
| 170043789 | KCP_186679 | | SG05S161 | C/G |
| 170044226 | KCP_187116 | | DG00AAJDY | A/G |
| 170044368 | KCP_187258 | | SG05S162 | G/T |
| 170044798 | KCP_187688 | | DG00AAJDZ | T/A |
| 170046441 | KCP_189331 | | SG05S214 | A/G |
| 170049852 | KCP_192742 | rs1973529 | DG00AAJEB | T/C |
| 170050303 | KCP_193193 | | DG00AAJEC | G/A |
| 170051066 | KCP_193956 | rs2202440 | SG05S163 | C/T |
| 170051726 | KCP_194616 | rs2036560 | DG00AAJEE | T/C |
| 170053658 | KCP_196548 | | DG00AAJEF | A/G |
| 170054788 | KCP_197678 | rs962804 | DG00AAJEG | T/C |
| 170054885 | KCP_197775 | | DG00AAJEH | C/T |
| 170056043 | KCP_198933 | | DG00AAJEJ | G/A |
| 170056475 | KCP_199365 | rs6555911 | DG00AAJEK | A/G |
| 170056955 | rs2339139 | rs2339139 | DG00AAFCR | A/G |
| 170057351 | KCP_200241 | | DG00AAJEL | A/G |
| 170059095 | KCP_201985 | | DG00AAJEM | G/A |
| 170059177 | KCP_202067 | rs2221440 | DG00AAJEN | A/G |
| 170059905 | KCP_202795 | rs875184 | DG00AAJEO | C/T |
| 170061292 | rs872435 | rs872435 | SG05S981 | G/T |
| 170061352 | KCP_204242 | rs6897344 | SG05S166 | C/T |
| 170063377. | KCP_206267 | | SG05S168 | A/G |
| 170064771 | KCP_207661 | | SG05S169 | C/G |
| 170064881 | rs329468 | rs329468 | SG05S896 | A/G |
| 170065075 | KCP_207965 | | SG05S170 | C/T |
| 170068635 | KCP_211525 | | SG05S173 | A/G |
| 170068960 | KCP_211850 | rs329470 | SG05S185 | C/T |
| 170069885 | KCP_212775 | rs4349730 | SG05S186 | A/G |
| 170070041 | rs50057 | rs50057 | SG05S1270 | A/G |
| 170073252 | rs50364 | rs50364 | DG00AAFCD | A/G |
| 170078909 | KCP_221799 | rs7733559 | DG00AAJHJ | A/T |
| 170080678 | KCP_223568 | | SG05S917 | G/T |
| 170081292 | KCP_1152 | | SG05S176 | C/T |
| 170081473 | KCP_1333 | | SG05S921 | A/G |
| 170082330 | KCP_225220 | | SG05S177 | A/G |
| 170082789 | KCP_2649 | | SG05S923 | C/T |
| 170084981 | KCP_227871 | | SG05S178 | C/G |
| 170085097 | KCP_227987 | rs2277951 | SG05S483 | C/T |
| 170085115 | KCP_4976 | | SG05S187 | C/T |
| 170085217 | KCP_228107 | | SG05S179 | A/T |
| 170085217 | KCP_5077 | | SG05S179 | A/T |
| 170089631 | KCP_232521 | rs1592987 | SG05S1293 | A/T |
| 170090765 | KCP_233655 | rs2032863 | SG05S989 | A/G |
| 170094615 | KCP_237505 | rs4867628 | SG05S188 | C/T |
| 170095540 | KCP_15400 | | SG05S946 | C/T |
| 170095701 | KCP_238591 | | SG05S180 | C/T |
| 170096292 | KCP_16152 | rs4868018 | SG05S948 | A/G |
| 170098209 | KCP_241099 | rs1363712 | SG05S189 | C/T |
| 170098209 | KCP_18069 | rs1363712 | SG05S189 | C/T |
| 170098637 | KCP_241527 | rs1363713 | SG05S190 | G/T |
| 170098914 | KCP_241804 | rs1055381 | SG05S191 | C/T |
| 170105556 | D5S625 | | | |
| 170167429 | DG5S959 | | | |
| 170361737 | rs1551583 | rs1551583 | SG05S1619 | C/G |
| 170389497 | rs1457692 | rs1457692 | SG05S1618 | A/G |

[0303] In order to define SNP-only haplotypes, 66 SNPs (Bold entries in Tables 12 and 13) were further genotyped totalling 948 diabetic patients (538 with BMI<30; 410 with BMI>=30) and 570 controls across 600 kb of KChIP1, of which 58 were concentrated in the 231 kb region encompassing exon 1b, the large intron (where Hap D1 resides) through to exon 8. The most significant 7-SNP haplotype (Hap S7—see Table 14) observed in non-obese Type II diabetes. (p=1.33×10⁻⁶) is significantly correlated with D1 (D′=0.76 between Hap D1 and Hap S7) and captures approximately 75% of the chromosomes that carry Hap D1. The relative risk of this 280 kb haplotype for all diabetes patients is 1.77, with a carrier frequency of 40%.

[0304] Hap S7 can be made more specific by adding more SNPs, e.g., by adding DG00AAJEH, the relative risk increases to 2.28 in all diabetic patients vs controls. This variant of Hap S7, denoted Hap S7′, has a carrier frequency of 20.1% in all diabetes patients and population attributable risk (PAR)=12.3%

TABLE 14
Alleles contained within Hap S7 and Hap S7′

| | Length | | | | | | | | |
|---|---|---|---|---|---|---|---|---|---|
| Haplotype | (kb) | | | | | | | | |
| Hap S7 | 280 | G | rs1032856 | G | KCP_rs888934 | T | KCP_93545 | C | KCP_102882 |
| | | G | KCP_169234 | G | KCP_186048 | | | A | KCP_16152 |
| Hap S7′ | 280 | G | rs1032856 | G | KCP_rs888934 | T | KCP_93545 | C | KCP_102882 |
| | | G | KCP_169234 | G | KCP_186048 | C | KCP_197775 | A | KCP_16152 |

[0305] TABLE 15
Association analysis of Hap S7 (Hap E) and Hap S7′ (HAP E′) in type 2 diabetes.

| | p-val | r | #aff | aff. freq | aff. freq (carr) | #con | con. freq | con. freq (carr) | info |
|---|---|---|---|---|---|---|---|---|---|
| Hap E | | | | | | | | | |
| T2D BMI < 30 | 1.33E−06 | 1.929 | 525 | 0.2549 | 0.379841195 | 527 | 0.1506 | 0.255828099 | 0.654 |
| T2D BMI > 30 | 0.015813 | 1.451 | 387 | 0.1959 | 0.315039082 | 527 | 0.1437 | 0.24617045 | 0.670 |
| T2D All | 5.04E−06 | 1.769 | 912 | 0.2270 | 0.350961655 | 527 | 0.1424 | 0.244220163 | 0.661 |
| T2D Males | 1.56E−05 | 1.831 | 526 | 0.2337 | 0.358157968 | 527 | 0.1428 | 0.244772025 | 0.650 |
| T2D Females | 0.001484 | 1.623 | 386 | 0.2187 | 0.34178225 | 527 | 0.1471 | 0.250938707 | 0.651 |
| Hap E′ | | | | | | | | | |
| T2D BMI < 30 | 0.000185 | 2.248 | 518 | 0.1229 | 0.215573079 | 453 | 0.0587 | 0.110434655 | 0.571 |
| T2D BMI > 30 | 0.015423 | 1.896 | 379 | 0.0966 | 0.174484759 | 453 | 0.0534 | 0.101016667 | 0.517 |
| T2D All | 0.000105 | 2.279 | 897 | 0.1130 | 0.20051463 | 453 | 0.0530 | 0.100301178 | 0.535 |
| T2D Males | 0.000551 | 2.243 | 517 | 0.1098 | 0.195525378 | 453 | 0.0521 | 0.098826539 | 0.545 |
| T2D Females | 0.004482 | 1.976 | 380 | 0.1101 | 0.195946622 | 453 | 0.0589 | 0.110893515 | 0.564 |

Additional Analysis of Haplotypes in the KChIP1 Region.
Additional SNP Genotyping for KChIP1 Gene

[0306] By increasing the haplotype diversity studied within the LD block spanning the KChIP1 gene through typing additional markers, additional haplotypes made up of only SNPs that correlated with D1 or were independent were expected. A 232 kb region was sequenced encompassing the full length KChIP1 gene in 94 Icelandic patients and controls in order to search for additional SNPs for genotyping. None of the SNPs identified caused a non-synonymous change in the coding sequence pointing to the uncommonly conserved nature of the primary structure of KChIP1. Of the 716 SNPs identified in this effort and validated public SNPs either side of the sequenced region, 66 were selected for further genotyping in 802 unrelated Icelandic T2D patients (447 with BMI<30) and 570 population-based controls. The remaining SNPs were excluded from further typing as they either completely correlated with the selected SNPs and therefore were redundant with respect to the information they would provide, or the SNP had a very low minor allele frequency (<5%). The 66 SNPs are listed in Table 25. The LD plot of the 66 SNPs is in FIG. 12 and agrees with the LD structure derived by the HapMap project in a Caucasian population.

[0307] The most significant SNP-only haplotype observed, when searching for haplotypes containing up to 3 SNPs, was haplotype S3 (p-value=1.36×10−6; aff allelic freq=59.8%; RR=1.61; PAR=40.1%) (G SG05S96 C DG00AAJIB C DG00AAJHF) that survived our adjustment for multiple testing for all possible three-marker haplotypes (p-value=0.04). With obese Type II diabetes patients, the RR was 1.47 (p-value=2.89×10⁻⁴; aff allelic freq=57.5%; PAR=38.0%) (FIG. 12). D1 is highly correlated to haplotype S3.

[0308] This significant result was followed with an expansion of the haplotype up to and including 7 markers. Haplotype S7 was (G SG05S96 G SG05S93 T SG05S64 C DG00AAJIB G SG05S156 G SG05S213 A SG05S948) observed with high correlation to S3 but with higher relative risk (p-value=2.33×10⁻⁷; aff allelic freq=25.6%; RR=2.05; PAR=24.6%). With obese Type II diabetes patients, the RR was 1.52 (p-value=0.009; aff allelic freq=19.6%; PAR=12.9%).

KChIP1 is Expressed in Pancreatic β-Cells

[0309] KChIP1 was initially identified in brain through yeast two-hybrid screens using Kv4.3 as a bait. By Northern blot analysis we detected expression in brain and somewhat less expression in pancreas and kidney (FIG. 9A). Western blot analysis detected KChIP in insulin-secreting rat pancreatic β-cell line, INS-1, but not in whole-pancreas homogenates. This is consistent with specific localization to β-cells as KChIP1 was most likely not detected in pancreatic whole lysates since islets constitute only 2-3% of the pancreas (FIG. 9B).

Loss of Function of KChIP1 Increases Insulin Secretion in Pancreatic β-Cells

[0310] When viewed in the context of previous data indicating its role in regulating the function of Kv4 type voltage-gated potassium channels and the known role of the K_{ATP} channel in propagating insulin secretion, the expression of KChIP1 in pancreatic cells suggested to us that KChIP1 might play a role in control of insulin secretion. To assess the requirement of KChIP1 for insulin secretion KChIP1 was knocked down by RNA interference in rat pancreatic β-cells INS-1 cells (FIG. 9B). We obtained the best knockdown of KChIP1 using a siRNA targeted to the 3′ end of the mRNA encoding the C-terminus of KChIP1 (shKChIP1#sh432). The siRNA was delivered into INS-1 cells using the retroviral vector pSIREN-RetroQ; this vector is designed to stably express a small interfering dsRNA (siRNA) from the human U6 promoter. As a control, we used INS-1 cells expressing an irrelevant luciferase siRNA (shLuc) from a hairpin construct or a retrovirus that expresses the GFP protein. Based on Western blot analysis, the estimated silencing of KChIP1 expression for the INS1-shKChIP1#432 cells was 82% compared to INS1-shLuc cells (100%) (FIG. 10A).

[0311] The effect of reduced KChIP1 expression in INS-1 cells on insulin secretion was analyzed by comparing insulin secretion in INS-1 cell lines stably transduced with either pSIREN-RetroQ-shKChIP1 or control vector pSIREN-RetroQ-shLuc. The amount of secreted insulin was determined both at the basal levels and after challenging with 11.2 mM glucose. In INS-1-shKChIP1#432 cells, basal insulin secretion was increased 1.8 fold (two-sided: p-value=1.84×10⁻⁷) and after glucose stimulation was increased 1.8 fold (two-sided: p-value=1.89×10⁻⁶) when compared to INS-1-shLuc cells (FIG. 10B). The unrelated siRNA for luciferase did not affect either basal secretion or glucose induced secretion when compared to INS-1 cells expressing GFP (data not shown).

[0312] The putative role of KChIP1 in insulin secretion was also evaluated by overexpressing KChIP1 in INS-1 cells using retroviral mediated gene transfer. INS-1 cells were stably transduced with either the pQCXIN-KChIP1 retrovirus expressing the human KChIP1 cDNA or an empty pQCXIN retrovirus as control. Western blot analysis demonstrated that the production of the KChIP1 protein from the retrovirus was in excess over the endogenous KChIP1 protein (FIG. 11A). The control cells, INS-1-pQCXIN, showed a 5-fold increase in insulin release in response to a glucose challenge. In contrast, glucose stimulated insulin secretion was reduced almost two-fold (50%) (p-value=5.22×10⁻⁵) in KChIP1 overexpressing INS-1 cells when compared to the control (INS-1 pQXCIN) (FIG. 11B). The basal insulin secretion was reduced very slightly in KChIP1 overexpressing cells when compared to the control cells. The expression of KChIP1 was unchanged under the different experimental conditions (basal vs. glucose stimulated) (FIG. 11A).

[0313] These results indicate that KChIP1 is a negative regulator of insulin secretion by INS-1 cells, although these experiments do not show whether KChIP1 has a direct or an indirect effect on insulin secretion. The KChIP1 gene has not, to date, been implicated in the pathogenesis of Type II diabetes. Isolation of this Type II diabetes gene was achieved by genome-wide linkage analysis with microsatellite markers and subsequent locus-wide association analysis of the 5q34-q35.2 locus with additional microsatellite markers. By comparing the frequencies of individual alleles and haplotypes between the two cohorts, the location of the putative disease gene was narrowed down to a few hundred kilobases. Subsequently, gene assessment was carried out using SNPs and additional microsatellites typed in all the genes in and around the observed region of association. The gene that showed strongest association with non-obese Type II diabetes was KChIP1, encoding the Kv-channel interacting protein 1 (KChIP1). This demonstrates a strategy of the usefulness of highly informative microsatellite markers to complement SNP markers in association studies that has additionally been used in the isolation of genes for myocardial infarction, ischemic stroke, osteoporosis, and schizophrenia. Each microsatellite exhibits a diversity of alleles with a range of frequencies that facilitate cost-effective studies of haplotype diversity within any given set of LD blocks.

[0314] Two independent disease-associated haplotypes within the KChIP1 gene, haplotype S3 and D2 are reported. Haplotype S3 is significant in Iceland even after correction for multiple testing through randomization of the phenotype. D2 was first found to show significant association to Type II diabetes in the Danish cohort even after correction for multiple markers. This haplotype showed a crisp replication in the Icelandic cohort. The two haplotypes appear to be independent and are additive when contributing to Type II diabetes. Over 60% of the Icelandic and Danish Type II diabetes patients carry one or both haplotypes. No underlying mutations within coding exons were found that capture a substantial portion of the risk of the overlying disease haplotype; therefore, these variants are most likely surrogates for underlying functional variants that affect transcription, splicing, message stability, transport or translation efficiency.

[0315] Analyzing the expression pattern of KChIP1 in diabetes relevant target tissues revealed that the gene has a limited tissue distribution. In lysates of whole pancreas the protein was not observed because it was most likely below the level of detection. The islets of Langerhans account for only 2-3% of the pancreas; however, KChIP1 was readily detected in pure rat α-cell lysates. Therefore, functional assays were used to test the hypothesis that KChIP1 plays a role in α-cell function suc has insulin secretion. Employing stable cell lines, in which endogenous KChIP1 has been knocked down by approximately 80% using siRNA interference, it was demonstrated that the loss of KChIP1 expression results in an increase in both basal and glucose-stimulated insulin secretion. Conversely, over-expression of KChIP1 reduces insulin secretion stimulated by glucose. This showed that KChIP1 has an inhibitory effect on insulin secretion which has not been reported previously. Thus, KChIP1 either directly or indirectly exerts a negative influence on insulin secretion.

[0316] The hypothesis that KChIP1 plays a role in Type II diabetes is supported by showing that haplotype S3 is significantly correlated with serum insulin levels in non-medicated GAD negative Type II diabetes patients. It was important to remove GAD positive patients since they are more likely to have a form of diabetes closer to Type 1 DM with inflammatory β-cell destruction (LADA). The study was applied to a subcohort of Type II diabetes patients who had insulin measurements while not on oral diabetes medications or insulin as they will affect insulin levels. Taken together with the β-cells functional this data suggests that the disease associated haplotypes may directly lead to increased KChIP1 expression in pancreatic β-cells thus causing impaired insulin secretion in response to glucose. The susceptibility gene that we have isolated influences insulin Type II diabetes secretion supporting the hypothesis of a primary defect in β-cells in many non-obese patients.

Methods

Participation

[0317] The Data Protection Authority of Iceland and the National Bioethics Committee of Iceland approved the study. All patients who participated in the study gave informed consent. All personal identifiers associated with blood samples, medical information, and genealogy were first encrypted by the Data Protection Authority, using a third-party encryption system (Gulcher and Kristjansson et al. 2000). This study was based on a list of 2400 Type II diabetic patients diagnosed either through a long-term epidemiologic study done at the Icelandic Heart Association over the past 30 years or at one of two major hospitals in Reykjavik over the past 12 years.

[0318] Two-thirds of these patients are alive, representing about half of the population of known Type II diabetes patients in Iceland. The majority of the patients have been contacted for this study, and the cooperation rate exceeded 90%. All participants in the Type II diabetes study visited the Icelandic Heart Association where each answered a questionnaire, had blood drawn and a fasting plasma glucose measurements taken. Questions about medication and age at diagnosis were included. Their height (m) and weight (kg) were measured to calculate BMI. The Type II diabetes patients in this study were diagnosed as described in our previously published linkage study (Reynisdottir and Thorleifsson et al. 2003). In brief, the diagnosis of Type II diabetes was confirmed by study physicians through previous medical records, medication history, and/or new laboratory measurements. For previously diagnosed Type II diabetes patients the reporting of oral glucose-lowering agent use confirmed Type II diabetes. Individuals who were currently treated with insulin were classified as having Type II diabetes if they were also using or had previously used oral glucose-lowering agents. In this cohort the majority of patients on medication take oral glucose-lowering agents and only a small portion (9%) require insulin. Although the prevalence of LADA (latent autoimmune diabetes in adults [MIM 222100, 138275]) among diabetic patients in Iceland is not formally known, it is generally considered to be less than 10% in European diabetics (Tuomi, Carlsson et al. 1999). For hitherto undiagnosed individuals, the diagnosis of Type II diabetes and impaired fasting glucose (IFG) was based on the criteria set by the American Diabetes Association (Expert Committee on the Diagnosis and Classification of Diabetes Mellitus 1997). The average age of the Type II diabetes patients in this study was 69.7 years.

Genotyping

[0319] New sequence repeats (i.e., dinucleotide, trinucleotide, and tetronucleotide repeats) were identified with the Sputnik program as found on the espresso software website and tested for polymorphicity in 94 controls. The size in basepairs of the lower allele of the CEPH sample 1347-02 (CEPH genomics repository) was subtracted from the size of the microsatellite amplicon and used as a reference.

[0320] Single nucleotide polymorphisms (SNPs) in the genes under investigation were detected by PCR sequencing exonic and intronic regions from 94 non-obese Type II diabetes patients and 94 population-based controls. Subsequently, the KChIP1 gene was sequenced in a total of 94 Icelandic patients and controls to identify additional SNPs for genotyping and to characterize the linkage disequilibrium structure of the region. Public polymorphisms were identified using the NCBI SNP database found on the the NCBI world wide website. Subsequent SNP genotyping was carried out using either fluorescent polarization template-directed dye-terminator incorporation (SNP-FP-TDI assay) or TaqMan (Applied Biosystems).

Insulin and GAD Antibody Measurements

[0321] Insulin and GAD antibody levels were measured in serum for the majority of the Type II diabetes patients according to the manufacturers' instructions. Insulin levels were measured using the AutoDELFIATM Insulin kit (Perkin Elmer). GAD antibody levels were quantified using the Diaplets Anti-GADPLUS ELISA assay (Roche Molecular Biochemicals). 94 LADA cases (GAD antibody<32 ng/ml) out of the 953 (9.86%) Type II diabetes cases were identified and tested.

Danish Cohort

[0322] The Danish study group was selected from the PERF (Prospective Epidemiological Risk Factors) study in Denmark (Bagger and Riis et al. 2001). Two hundred and eighty-two females had been diagnosed previously with Type II diabetes and/or measured >=7 mM glucose, of which, 149 were non-obese (BMI<30). As controls, 346 unaffected females were randomly drawn from the same study.

Statistical Methods for Association and Haplotype Analysis

[0323] For single marker association to Type II diabetes the fisher exact test was used to calculate a two-sided p-value for each allele. Allelic frequencies were presented rather than carrier frequencies for microsatellites, SNPs and haplotypes. To minimize any bias due to relatedness of the affected individuals, who were recruited as families for the linkage analysis, first- and second-degree relatives were eliminated from the list of affected individuals. For the haplotype analysis the program NEMO was used as described above. NEMO handles missing genotypes and uncertainty with phase through a likelihood procedure, using the expectation-maximization algorithm as a computational tool to estimate haplotype frequencies. Under the null hypotheses, the affected individuals and controls are assumed to have identical haplotype frequencies. Under the alternative hypotheses, the candidate at-risk haplotype is allowed to have a higher frequency in the affected individuals than in controls, while the ratios of frequencies of all other haplotypes are assumed to be the same in both groups. Likelihoods are maximized separately under both hypotheses, and a corresponding 1-degree-of freedom likelihood ratio statistics is used to evaluate the statistical significance.

[0324] To assess the significance of the haplotype association corrected for multiple testing across the candidate genes under investigation, a randomization test using the same genotype data was carried out. The cohorts of affected individuals and controls were randomized and the analysis was repeated. This procedure was repeated up to 1,000 times and the adjusted P value presented is the fraction of replications that produced a P value for a haplotype tested that is lower than or equal to the P value observed using the original patient and control cohorts.

[0325] For both single-marker and haplotype analysis, relative risk (RR) and population attributable risk (PAR) was calculated assuming a multiplicative model (Falk and Rubinstein, 1987; Terwilliger and Ott, 1992). LD between pairs of SNPs was calculated using the standard definition of D′ (Lewontin 1964) and R2 (Hill and Robertson 1968). Using NEMO, frequencies of the two marker allele combinations was estimated by maximum likelihood and evaluated deviation from linkage equilibrium by a likelihood ratio test. When plotting all SNP combinations to elucidate the LD structure in a particular region, D′ was plotted in the upper left corner and p-values in the lower right corner. In the LD plot, the markers are plotted equidistantly rather than according to their physical positions.

Western Blotting, Northern Blotting and Immunohistochemistry

[0326] For Western blotting, tissues were harvested from C57BL/6J mice and immediately frozen in liquid nitrogen. The frozen pancreas and the rat pancreatic β-cell line INS-1 (F. Hoffmann-La Roche, Basel) were lyzed in RIPA buffer (1% DOC, 1% NP-40, 0.1% SDS, 150 mM NaCl, 2 mM EDTA, 20 mM MOPS, pH 7.2 and protease inhibitor cocktail no. III, Calbiochem) for 30 minutes on ice. INS-1 cells from insulin secretion assays were lysed in Triton-X buffer (1% Triton-X, 150 mM NaCl, 1 mM EDTA and 10 mM Tris-HCl, pH 8.0). All lysates were cleared by centrifugation at 14 000 RPM for 20 minutes at 4° C. and the protein concentrations were determined (BCA, Pierce). A polyclonal antiserum against KChIP1 was produced because the commercial antibody used for the immunohistochemistry did not detect KChIP1 on a Western blot. A codon optimized recombinant KChIP1 protein (aa 34-216), with a C-terminal His tag, was expressed in Top10F′ cells (Invitrogen), purified on Ni-NTA superflow column and injected into rabbits. The antiserum was affinity purified before use. The specificity of the antiserum was determined by performing a competition experiment by probing an identical blot with the antiserum in the presence of an excess of the recombinant protein. As a loading control, the blots were re-probed with anti-GAPDH antibody (Research Diagnostics). The proteins were detected by ECL system (Amersham). A multiple-tissue Northern blot (human #7760-1; BD Bioscience) was hybridized with a human KChIP1 probe, spanning nucleotides 1-200 (exons 1 and 2). The probe was labeled with α-^{P}32-CTP by random primed DNA labeling (Roche) according to the manufacturer's instructions. The membrane was exposed to MS-film (Kodak) for 2 days. The probe detected only a single transcript suggesting that hybridization with the N-terminus of KChIP1 showed no cross-reactivity with other KChIP family mRNAs.

Retroviral Constructs

[0327] KChIP1 full-length human KChIP1 was cloned by PCR from Marathon ready cDNA (Clontech) into pENTR/D-TOPO (Invitrogen) and verified by sequencing. Subsequently, it was recombined with pDEST40 (Invitrogen) to create pDEST40-KChIP1, which is C-terminally tagged with V5 and His. KChIP1-V5 was cloned by PCR into the retroviral vector pQCXIN (BD-Bioscience) to create pQCXIN-KChIP1, a vector that expresses human KChIP1 tagged with V5 and His. As controls, we used the empty vector pQCXIN or a vector expressing GFP, pQCXIN-GFP.

[0328] For the knockout retrovirus construct, the pSIREN-RetroQ vector (BD Bioscience) was used and the target sequences were embedded in a hairpin oligonucleotide, according to the manufacturer's instructions. To select the target sequence, the siRNA-designer algorithm (BD Bioscience) was used and the selected sequences were examined for their specificity in targeting only KChIP1 (NCBI-Blast). The target sequence for construct #432 was AGAGGAGATGATGGACATT (SEQ. ID NO. 259). The oligonucleotides were annealed and ligated into the RNAi-Ready pSIREN-RetroQ vector according to the manufacturer's instructions (BD Biosciences). As a control, we employed either the luciferase sh-OligoDNA delivered with the vector (BD Bioscience) or pQCXIN-GFP (described above).

Overexpression and Knockout of KChIP1 in INS-1 Cells

[0329] Retroviruses were produced using the 293GPG cell line (generously provided by R. C. Mulligan, Harvard Medical School, Boston), which has an inducible expression of the VSV-G surface protein (tetracycline regulatory system) and a stable expression of the Gag and Pol viral packaging elements (Ory, Neugeboren et al. 1996). Stable producer cell lines expressing KChIP1, GFP, shLuciferase, shKChIP1#432 and an empty virus were generated as described by Ory et al., (Ory, Neugeboren et al. 1996). In brief, 293GPG cells were transfected with 20 μg of the different expression vectors and after 24 h the medium was replaced by tetracycline-free medium to induce VSV-G protein expression for packaging the virus. The supernatant was harvested and filtered 48 h later. To produce high titer virus stock used for INS-1 infection, the 293GPG cells were grown until 95% confluent and then tetracycline containing medium was removed. Virus containing supernatant was harvested over the next 24 h, 48 h and 72 h. The viral supernatant was filtered and concentrated by ultracentrifugation. The INS-1 cells were infected twice over a period of 4 days with the viral supernatant. Following the final infection, cells were split into selection medium containing 0.5 μg/ml puromycin or 200 μg/ml G418 for two weeks.

[0330] The level of KChIP1 knock-down was determined by Western blotting (described above) of 5, 10 and 25 ug of cell lysates. The Western blot was scanned and KODAK ID software was used to determine the ratio between the bands. To test for overexpression of protein, the cells were either immunofluorescently labeled with V5 mouse monoclonal antibody (data not shown) or by Western blotting (described above).

Insulin Secretion Assay

[0331] The INS-1 cells were trypsinized, resuspended in growth medium and washed three times in Krebs Ringer Buffer (KRB: 115 mM NaCl, 4.7 mM KCl, 2.56 mM CaCl₂, 1.2 mM KH2PO4, 1.2 mM MgSO4, 20 mM NaHCO3, 16 mM HEPES) containing 0.1% BSA and 0.5 mM glucose. Subsequently, the cells were resuspended in KRB and 150 000 cells were seeded in a 96 well plate (100 μl/well) that had been coated with Poly-D-Lysine. The cells were allowed to settle for 2 h at 37° C. before replacing the buffer with KRB containing 0.5 mM or 11.2 mM glucose and incubating for additional 2 h. The supernatant was collected, spun down, diluted 1:2 or 1:5 (FIGS. 10B and 11B respectively) and the secreted amount of insulin was quantified with a rat insulin ELISA kit (Mercodia). In order to have sufficient power for the analysis, 12 data points were measured for each condition. A student's t-test was applied assuming unequal variance to calculate the significance of the data (p-value: two sided) using Excel data analysis tools.

Correlation with Serum Insulin Levels

[0332] To determine if the S3 haplotype in KChIP1 showed a negative correlation to serum insulin levels as previously predicted (Reynisdottir and Thorleifsson et al. 2003) and in correlation with biological data presented above, a study cohort of 527 unrelated Type II diabetic patients, representing a large subset of those analyzed in the initial association study was used in this analysis. All patients had basal fasting insulin levels measured that were subsequently age and sex adjusted. The patients were GAD negative to exclude patients with LADA (latent autoimmune diabetes in adults, a form of Type 1 diabetes) and not on insulin treatment to exclude any confounding influence on the serum insulin measurements. For this cohort, a significant negative correlation was observed, with a reduction in age and sex-adjusted insulin levels by 0.100 per copy of haplotype S3 (one-sided p-value=0.045). Note that a one-sided p-value for this correlation is reported as postulated, based on previous linkage data and the reported assay work, that the correlation would be negative with respect to insulin levels.

[0333] Excluding all medicated Type II diabetes patients from the analysis, a significant negative correlation continued to be observed, with a greater reduction in age and sex-adjusted insulin levels of 0.124 per copy of haplotype S3 (one-sided p-value=0.075). Although the correlation was stronger in this group, the p-value is higher due to the fewer numbers analyzed in this set.

[0334] By splitting the two cohorts into upper and lower 50^{th} percentiles based on serum insulin levels, the frequency of the at-risk haplotype was greater in the lowest 50^{th} percentile for both cohorts (Table 19). Table 19 also highlights that the difference between the upper and lower 50^{th} percentiles was more apparent among the non-medicated set; in this case the frequency of haplotype S3 was significantly different between these defined groups (p-value=0.0046). Furthermore, homeostasis model assessment (HOMA), a measure of insulin sensitivity, can be determined by fasting insulin (μU dl−1)×fasting glucose (mg dl−1)/22.5. The lowest 50^{th} percentile of HOMA values can be considered as those non-medicated patients with normal insulin sensitivity as opposed to those in the upper 50^{th} percentile who can be considered as displaying insulin resistance. Haplotype S3 is significantly over-represented in the lower HOMA 50^{th} percentile (p=0.025).

[0335] These data are in keeping with the in vitro data and support the notion that KChIP1 may play a significant role in insulin-secretion.

[0336] In summary, this additional association study indicates two independent haplotypes, haplotypes S3 and D2, were observed carried by over 60% of non-obese Type II diabetes patients that confer risk to Type II diabetes in Iceland. It is shown that D2 also confers significant risk of Type II diabetes in Denmark. The study of the biology of KChIP1 in β-cells shows that this gene has a role in the regulation of insulin secretion in vitro. This appears to be true in vivo since this study finds that haplotype S3 correlates with lower insulin levels within the Type II diabetes patient cohort.

Discussion

[0337] As described herein, the positional cloning of a novel Type II diabetes gene, encoding KChIP1, within the 5q34-q35.2 locus is shown. This gene confers substantial risk of Type II diabetes in non-obese individuals (BMI<30). Biological data that point to a role for KChIP1 in the regulation of insulin secretion is also shown. KChIP1 is expressed in pancreatic β-cells and perturbations of KChIP1 expression in rat pancreatic β-cells affect basal and glucose stimulated insulin release. Serum insulin levels are decreased in patients with an at-risk haplotype, underscoring the role that KChIP1 variants may play in the pathogenesis of Type II diabetes. This is in line with the hypothesis from our previous linkage paper that a non-obese Type II diabetes study group is enriched with patients with primarily beta cell dysfunction as they do not need as severe a level of obesity related insulin resistance to unmask their diabetes. In fact, the data presented show that the KChIP1 gene variants inversely correlate with insulin resistance among Type II diabetes patients.

[0338] Two significant haplotypes in the KChIP1 gene that associate with Type II diabetes are described. The gene product is expressed in pancreatic β-cells and when its expression is reduced in an experimental system, more insulin is released. Conversely, overexpression of KChIP1 resulted in reduced insulin secretion. The same gene variants that show association to Type II diabetes also correlate with low insulin levels in Type II diabetes patients suggesting that these variants lead to increased KChIP1 and lower insulin secretion. Thus the genetic and functional data point to a control mechanism of insulin secretion.

TABLE 16
Criteria for haplotype length different and
unrelated patients - restricted to 300 kb

| | | | Aff | | |
|---|---|---|---|---|---|
| Haplo- | | | allelic | Haplotype span | |
| type | p-value | RR | freq | (B34) | Markers in Haplotype |
| F1 | 3.1E−05 | 5.6 | 3.8 | 1.68.82-1.69.11 | −6 DG5S37 −14 DG5S40 |
| F2 | 1.8E−05 | 5.6 | 3.9 | 1.68.82-1.69.11 | −6 DG5S37 0 DG5S101 |
| | | | | | −14DG5S40 |
| G1 | 1.8E−05 | 9.8 | 5.3 | 169.75-170.00 | 0 DG5S46 6 DG5S47 |
| | | | | | 0 DG5S953 0 DG5S955 |
| G2 | 2.3E−05 | 8.9 | 5.4 | 169.83-170.00 | 6 DG5S47 0 DG5S953 |
| | | | | | 0 DG5S955 |
| Table 16: Haplotypes within Regions A and B of the 1-LOD-drop that show the strongest association to non-obese Type II diabetes. For each haplotype (i) a two-sided p-value for a single test of association to non-obese Type II diabetes patients, (ii) the corresponding relative risk (RR), (iii) the estimated allelic | | | | | |
| # frequency of the haplotype in the patient and the control cohort, (iv) the span of the haplotype (NCBI Build 34) and (v) the alleles (in bold) and markers that define the haplotype are shown. The relative location of haplotypes G1(shown as B1) and G2(shown as B2) are depicted in FIG. 8b. The control allelic frequencies of the A series and the B series haplotypes was 0.7% and 0.6% respectively. | | | | | |

[0339] TABLE 17
Table 17: Microsatellite and SNP haplotype association within KChIP1.
Type II Diabetes (T2D) Study

| | | | Aff allelic | |
|---|---|---|---|---|
| | p-value | RR | freq | Markers in haplotype |
| (a) | | | | |
| D1 haplotype | | | | |
| Non-obese | 1.00E−04 | Inf | 3.2% | −4 DG5S13 C SG05S176 0 D5S625 |
| T2D | | | | |
| Obese | 3.00E−03 | Inf | 2.6% | −4 DG5S13 C SG05S176 0 D5S625 |
| T2D | | | | |
| All T2D | 3.00E−03 | Inf | 2.6% | −4 DG5S13 C SG05S176 0 D5S625 |
| Danish | 0.06 | 0.0008 | 0.001% | −4 DG5S13 C SG05S176 0 D5S625 |
| T2D | | | | |
| (b) | | | | |
| D2 haplotype | | | | |
| Danish | 0.0004 | 2.59 | 10.5% | 0 DG5S124 C SG05S176 C SG05923 T |
| T2D | | | | SG05S187 A SG05S948 |
| All T2D | 0.025* | 1.52 | 8.2% | 0 DG5S124 C SG05S176 C SG05923 T |
| | | | | SG05S187 A SG05S948 |
| (a) The D1 haplotype is located in the 3′-end of the gene (170.0-170.15 Mb). Shown are results of a test of association for Type II diabetes patients vs. population controls for D1 in the Icelandic cohort (top) and a non-replication in a cohort of Danish Type | | | | |
| # II diabetes patients (bottom). The control allelic frequencies of D1 were undetectable in the Icelandic Type II diabetes cohort and 1.6% in the Danish Type II diabetes cohort. | | | | |
| (b) The most significant haplotype observed with the markers tested in the Danish Type II diabetes cohort, D2, was 54 kb long and had a relative risk of 2.59 and an aff allelic frequency of 10.5% (p = 0.0004). Interestingly, this haplotype was also observed in | | | | |
| # excess in the Icelandic Type II diabetes patient cohort, albeit with a lower relative risk of 1.52 (aff allelic frequency = 8.2%; one-sided p = 0.025). The control allelic frequencies of D1 in the Danish and Icelandic Type II diabetes cohorts were 4.3% and 5.5% respectively. | | | | |

*Note that we report a one-sided p-value for the test on the Icelandic cohort as that is a replication of association results previously observed in the Danish cohort.

[0340] TABLE 18
Table 18: SNP haplotype association across KChIP1. The most significant
SNP only haplotype observed in non-obese Type II diabetes was haplotype
S3 (p-value = 1.36 × 10⁻⁶; aff allelic freq = 59.8%;
RR = 1.61). The control allelic frequency of S3 was 48%

| | | | Aff allelic | |
|---|---|---|---|---|
| S3 | p-value | RR | freq | |
| Non-obese T2D | 1.36E−06 | 1.61 | 59.8% | G SG05S96 |
| | | | | C DG00AAJIB |
| | | | | C DG00AAJHF |
| Obese T2D | 2.99E−04 | 1.47 | 57.5% | G SG05S96 |
| | | | | C DG00AAJIB |
| | | | | C DG00AAJHF |
| All T2D | 4.95E−07 | 1.54 | 58.8% | G SG05S96 |
| | | | | C DG00AAJIB |
| | | | | C DG00AAJHF |

[0341] TABLE 19
Table 19: Haplotype S3 frequency in the upper and lower
50^{th} percentiles of sex-adjusted insulin levels among
Type II diabetes patients was identified.

| (a) TYPE II | | | | |
|---|---|---|---|---|
| DIABETES on | | | | |
| insulin | p-val | RR | Aff allelic freq | Con allelic freq |
| Lower 50^{th} | 9.6E−06 | 1.65 | 60% | 48% |
| percentile | | | | |
| Upper 50^{th} | 0.0076 | 1.35 | 56% | 48% |
| percentile | | | | |

| | | | Lower 50^{th} allelic | Upper 50^{th} allelic |
|---|---|---|---|---|
| | p-val | RR | freq | freq |
| Lower vs. Upper | 0.16 | 1.2 | 60% | 56% |
| percentile | | | | |

| (b) TYPE II | | | | |
|---|---|---|---|---|
| DIABETES not | | | | |
| on medication | p-val | RR | Aff allelic freq | Con allelic freq |
| Lower 50^{th} | 2.2E−05 | 1.84 | 63% | 48% |
| percentile | | | | |
| Upper 50^{th} | 0.47 | 1.11 | 52% | 48% |
| percentile | | | | |

| | | | Lower 50^{th} | Upper 50^{th} |
|---|---|---|---|---|
| | | | allelic | allelic |
| | p-val | RR | freq | freq |
| lower vs Upper. | 0.0046 | 1.67 | 63% | 52% |
| percentile | | | | |

(a) In a study cohort of GAD negative Type II diabetes patients not treated with insulin, the frequency of haplotype S3 was significantly higher in both the lowest and highest 50^{th} percentile of insulin; however the difference between the two groups was not significant (p = 0.16)
(b) For the subset of patients who were not on any diabetes medication, the frequency of haplotype S3 is significantly higher in the lowest 50^{th} percentile of insulin compared to the highest (p = 0.0046).

[0342] Markers in Candidates (Microsatellites in Italics)

TABLE 20
LCP 2: 5 microsatellites and 11 SNPs

| C05 Build 33 | Marker | deCODE alias |
|---|---|---|
| 169586308 | DG5S115 | |
| 169615490 | DG00AAIHM | LCP_47437 |
| 169615682 | DG00AAIHL | LCP_47245 |
| 169620730 | DG00AAIHK | LCP_42197 |
| 169625147 | DG00AAIHJ | LCP_37780 |
| 169625236 | DG00AAIHI | LCP_37691 |
| 169629401 | DG00AAIHH | LCP_33526 |
| 169633571 | DG00AAIHG | LCP_29356 |
| 169637933 | DG00AAIHF | LCP_24994 |
| 169638191 | DG00AAIHE | LCP_24736 |
| 169653708 | DG5S1173 | |
| 169655755 | DG00AAIHD | LCP_7173 |
| 169660310 | SG05S70 | LCP_2618 |
| 169661202 | DG5S44 | |
| 169693772 | DG5S45 | |
| 169702377 | DG5S46 | |

[0343] TABLE 21
KCNMB1: 7 microsatellites and 5 SNPs

| C05 Build 33 | Marker | Inhouse alias |
|---|---|---|
| 169653708 | DG5S1173 | |
| 169661202 | DG5S44 | |
| 169693772 | DG5S45 | |
| 169702377 | DG5S46 | |
| 169740666 | SG05S1611 | KNB_24222 |
| 169741173 | DG00AAIGG | KNB_24728 |
| 169745438 | DG5S1178 | |
| 169746339 | DG00AAIGH | KNB_29895 |
| 169751814 | DG00AAIHA | KNB_35370 |
| 169751843 | DG00AAIHB | KNB_35399 |
| 169788696 | DG5S47 | |
| 169843903 | DG5S119 | |

[0344] TABLE 22
KChIP1: 4 microsatellites and 6 SNPs-
positions shown in previous tables

| Marker | Inhouse alias |
|---|---|
| DG5S13 | |
| DG5S123 | |
| DG5S124 | |
| SG05S176 | KCP_1152 |
| SG05S923 | KCP_2649 |
| SG05S187 | KCP_4976 |
| SG05S179 | KCP_5077 |
| SG05S946 | KCP_15400 |
| SG05S948 | KCP_16152 |
| D5S625 | |

[0345] TABLE 23
GABRP: 8 microsatellites and 18 SNPs

| C05 Build 33 | Marker | Inhouse alias |
|---|---|---|
| 170015858 | DG5S123 | |
| 170041996 | DG5S124 | |
| 170105556 | D5S625 | |
| 170146165 | SG05S1753 | GAB_4360 |
| 170146304 | SG05S2147 | GAB_4499 |
| 170146363 | SG05S1754 | GAB_4558 |
| 170146503 | SG05S1755 | GAB_4698 |
| 170146540 | SG05S1756 | GAB_4735 |
| 170150984 | SG05S1757 | GAB_9179 |
| 170151033 | SG05S1758 | GAB_9228 |
| 170151181 | SG05S2148 | GAB_9376 |
| 170151190 | SG05S1759 | GAB_9385 |
| 170151213 | SG05S1760 | GAB_9408 |
| 170151321 | SG05S1761 | GAB_9516 |
| 170151417 | SG05S2246 | GAB_9558 |
| 170151703 | SG05S1762 | GAB_9898 |
| 170156610 | SG05S1750 | GAB_14805 |
| 170167429 | DG5S959 | |
| 170174367 | SG05S2144 | GAB_32642 |
| 170175717 | SG05S1751 | GAB_33912 |
| 170175966 | SG05S1752 | GAB_34161 |
| 170176037 | SG05S2146 | GAB_34232 |
| 170203240 | DG5S960 | |
| 170280782 | DG5S16 | |
| 170338421 | DG5S962 | |
| 170442700 | DG5S132 | |

[0346] TABLE 24
RANBP17: 11 microsatellites and 9 SNPs

| C05 Build 33 | Marker | Inhouse alias |
|---|---|---|
| 170203240 | DG5S960 | |
| 170220482 | SG05S2114 | RANRS1978461 |
| 170247896 | SG05S2111 | RANRS1423231 |
| 170280782 | DG5S16 | |
| 170315425 | SG05S2116 | RANRS477119 |
| 170338421 | DG5S962 | |
| 170406521 | SG05S2115 | RANRS2441016 |
| 170442700 | DG5S132 | |
| 170469573 | DG5S136 | |
| 170471385 | SG05S2113 | RANRS173465 |
| 170480360 | DG5S133 | |
| 170499980 | DG5S17 | |
| 170519072 | SG05S1613 | RANRS1445796 |
| 170635718 | SG05S1614 | RANRS2964525 |
| 170644993 | DG5S137 | |
| 170654830 | SG05S2112 | RANRS1469438 |
| 170673106 | DG5S53 | |
| 170675807 | DG5S968 | |
| 170681390 | SG05S2117 | RANRS891009 |
| 170735417 | DG5S904 | |

[0347] TABLE 25
66 SNPs selected-positions shown in previous table.

| Marker | Inhouse alias |
|---|---|
| SG05S83 | |
| SG05S96 | |
| DG00AAESP | |
| SG05S93 | |
| SG05S2107 | KCP_9677 |
| SG05S229 | KCP_10355 |
| DG00AAFCS | |
| DG00AAFCI | |
| DG00AAFCL | |
| SG05S556 | KCP_60703 |
| SG05S957 | KCP_82468 |
| SG05S64 | KCP_93545 |
| DG00AAJIB, | KCP_102882 |
| SG05S2479 | |
| DG00AAJIC | KCP_107380 |
| SG05S730 | KCP_113257 |
| SG05S745 | KCP_116355 |
| SG05S194 | KCP_124877 |
| SG05S195 | KCP_126086 |
| SG05S152 | KCP_129093 |
| SG05S480 | KCP_129127 |
| DG00AAJHB | KCP_130309 |
| SG05S197 | KCP_131244 |
| SG05S153 | KCP_131854 |
| SG05S154 | KCP_132677 |
| SG05S200 | KCP_135518 |
| SG05S481 | KCP_136036 |
| SG05S202 | KCP_137660 |
| SG05S482 | KCP_146746 |
| SG05S205 | KCP_149216 |
| DG00AAFCK | |
| SG05S208 | KCP_160145 |
| SG05S156 | KCP_169234 |
| SG05S210 | KCP_173848 |
| SG05S157 | KCP_173982 |
| DG00AAJHF | KCP_174243 |
| SG05S158 | KCP_175106 |
| DG00AAFCJ | |
| SG05S212 | KCP_180237 |
| SG05S213 | KCP_186048 |
| SG05S161 | KCP_186679 |
| DG00AAJDY | KCP_187116 |
| SG05S163 | KCP_193956 |
| DG00AAJEE | KCP_194616 |
| DG00AAJEF | KCP_196548 |
| DG00AAJEG | KCP_197678 |
| DG00AAJEH | KCP_197775 |
| DG00AAJEO | KCP_202795 |
| SG05S170 | KCP_207965 |
| SG05S186 | KCP_212775 |
| DG00AAFCF | |
| SG05S1285 | KCP_224153 |
| SG05S176 | KCP_224182 |
| SG05S923 | KCP_225679 |
| SG05S178 | KCP_227871 |
| SG05S483 | KCP_227987 |
| SG05S187 | KCP_228006 |
| SG05S1293 | KCP_232521 |
| SG05S188 | KCP_237505 |
| SG05S945 | KCP_238234 |
| SG05S946 | KCP_238430 |
| SG05S948 | KCP_239182 |
| SG05S189 | KCP_241099 |
| SG05S1608 | |
| SG05S1609 | |
| SG05S1610 | |
| DG00AADMS | |

KChIP1

[0348] The invention described herein has linked Type II diabetes to a gene encoding Kv channel-interacting protein 1 (KChIP1; also known as KCNIP1). In the brain and heart, rapidly inactivating (A-type) voltage-gated potassium (Kv) currents operate at subthreshold membrane potentials to control the excitability of neurons and cardiac myocytes. Although pore-forming alpha-subunits of the Kv4, or ShaI-related, channel family form A-Type currents in heterologous cells, these differ significantly from native A-Type currents. To identify proteins that interacted with the Kv4 subunit, An et al., (“Modulation of A-Type potassium channels by a family of calcium sensors” Nature 403:553-6 (2000)) used the yeast two-hybrid system with the intracellular amino terminus of the rat Kv4.3 subunit to screen rat midbrain cDNA libraries. Two Kv channel-interacting proteins were identified and called KChIPs (KChIP-1 and KChIP2). Library screening and database mining identified mouse and human orthologs of these genes. The KChIP1 cDNA encodes a 216-amino acid protein. The KChIPs have 4 EF-hand-like domains and bind calcium ions. Both KChIPs have distinct N termini but share approximately 70% amino acid identity throughout a carboxy-terminal 185-amino acid core domain that contains the 4 EF-hand-like motifs. Although the KChIPs have around 40% amino acid similarity to neuronal calcium sensor-1 and are members of the recovering/NCS subfamily of calcium-binding proteins, other members of this subfamily, such as hippocalcin, did not interact with Kv4 channels in the yeast 2-hybrid assay. An et al., (supra) additionally found that expression of KChIPs and Kv4 together reconstitutes several features of native A-Type currents by modulating the density, inactivation kinetics, and rate of recovery from inactivation of Kv4 channels in heterologous cells. Both KChIPs colocalize and coimmunoprecipitate with brain Kv4 alpha-subunits, and are thus integral components of native Kv4 channel complexes. As the activity and density of neuronal A-Type currents tightly control responses to excitatory synaptic inputs, these KChIPs may regulate A-Type currents, and hence neuronal excitability, in response to changes in intracellular calcium.

[0349] The glycosphingolipid sulfatide is present in secretory granules and at the surface of pancreatic β-cells (Buschard K, Fredman P. “Sulphatide as an antigen in diabetes mellitus”. Diabetes Nutr Metab 4:221-228 (1996)), and antisulfatide antibodies (ASA; IgG1) are found in serum from the majority of patients with newly diagnosed Type I diabetes. Buschard et al., (“Sulfatide controls insulin secretion by modulation of ATP-sensitive K(+)-channel activity and Ca(2+)-dependent exocytosis in rat pancreatic beta-cells” Diabetes 51:2514-21 (2002)) demonstrated that sulfatide produced a glucose- and concentration-dependent inhibition of insulin release from isolated rat pancreatic islets. This inhibition of insulin secretion was due to activation of ATP-sensitive K⁺-(K_{ATP}) channels in single rat β-cells. No effect of sulfatide was observed on whole-cell Ca²⁺-channel activity or glucose-induced elevation of cytoplasmic Ca²⁺ concentration. A key observation was that sulfatide stimulated Ca²⁺-dependent exocytosis determined by capacitance measurements and depolarized-induced insulin secretion from islets exposed to diazoxide and high external KCl. The monoclonal sulfatide antibody Sulph I as well as ASA-positive serum reduced glucose-induced insulin secretion by inhibition of Ca²⁺-dependent exocytosis. This suggests that sulfatide is important for the control of glucose-induced insulin secretion and that both an increase and a decrease in the sulfatide content have an impact on the secretory capacity of the individual β-cells.

[0350] In pancreatic β-cells, glucose triggers the closing of ATP dependent potassium channels resulting in depolarization of the membrane. This subsequently opens voltage-dependent Ca²⁺ channels, allowing an influx of Ca²⁺ leading to Ca²⁺ stimulated vesicle fusion and secretion of insulin. Membrane repolarization is mediated by the activation of voltage dependent K⁺ (Kv) channels in β-cells (Philipson, Rosenberg et al., 1994; MacDonald, Ha et al., 2001; MacDonald and Wheeler 2003). It has been suggested that in CNS neurons, KChIP1 plays a role in Kv channel trafficking and release from the ER (O'Callaghan, Hasdemir et al., 2003; Shibata, Misonou et al., 2003). KChIP1 may have a chaperone function that increases either surface expression or specific activity of Kv channels in pancreatic β-cells and thus, leads to a faster repolarization of the membrane and ultimately in decreased insulin secretion (Philipson, Rosenberg et al., 1994; MacDonald, Ha et al., 2001; MacDonald and Wheeler 2003). Thus, knock-down of KChIP1 may alter β-cell membrane repolarization kinetics, perhaps extending the period of membrane depolarization and increasing insulin secretion. Alternatively, KChIP1 may directly regulate trafficking of insulin vesicles exiting the post-ER, perhaps acting as a negative regulator of trafficking of insulin vesicles or release of insulin.

[0351] Type II diabetes is characterized by hyperglycemia, which occurs when insulin secretion from the pancreatic β-cells can no longer compensate for the insulin resistance of the target tissues (Dornhorst and Merrin 1994). However, it has been debated whether insulin resistance or impaired β-cell function is the primary defect resulting in Type II diabetes (Gerich, Diabetes 51 Suppl 1: S117-21 (2002).

Identification of At-Risk Variants Through Resequencing

[0352] The most specific haplotype observed, i.e. S7, was elected to carry out a resequencing exercise to identify more specific at-risk variants enriched on the haplotype background such that they are closer to the causative variant in this complex region of LD and, therefore, more likely to replicate in additional T2D cohorts.

[0353] The same primer pairs employed for SNP discovery across the gene were used in this approach. In parallel to the knowledge, gained from the previous gene sequencing effort, an ‘equivalence’ class of 9 SNPs was observed that was enriched among T2D patients carrying the S7 haplotype compared to the control carriers, and near absent in the non-carriers. These SNPs —SG05S808, SG05S792, SG05S1234, SG05S1237, SG05S814, SG05S1239, SG05S820, SG05S824 and SG05S1242. were perfect surrogates to each other and were all located in intron 1 of the KChIP1 gene.

[0354] One of these SNPs, SG05S808, was selected for further genotyping in the 802 T2D patients and 570 population based controls. The results show that there was excess of the minor T allele for this SNP both in non-obese (RR=1.44; p=0.026) and obese (RR=1.36; p=0.087, albeit of borderline significance) T2D patients. We sought to analyze if the association of this variant to T2D could be replicated in additional T2D cohorts.

Replication of the SG05S808 association to T2D

[0355] To verify the association of the minor T allele of the SG05S808 SNP to T2D, the SNP was genotpyed in a second Icelandic T2D cohort and in a T2D cohort from the US (Pennsylvania). As outlined in the table below, the association of the minor T allele of SG05S808 to obese T2D replicated in 2 additional cohorts i.e. in the second cohort of Icelandic T2D (RR=1.48; p=0.035), and in the US Caucasian obese T2D (RR=2.1; p=0.009). The original observation in non-obese T2D patients was not replicated in any of the additional cohorts.

| | two-sided | | | Aff | | Ctrl |
|---|---|---|---|---|---|---|
| ORIGINAL STUDY GROUP | p-value | RR | #aff | freq | #ctrl | freq |
| FIRST ICELANDIC: | 0.026 | 1.443 | 428 | 0.100 | 529 | 0.072 |
| Non-obese T2D | | | | | | |
| FIRST ICELANDIC: | 0.087 | 1.361 | 341 | 0.095 | 529 | 0.072 |
| Obese T2D | | | | | | |
| REPLICATION | one-sided | | | Aff | | Ctrl |
| STUDY GROUP | p-value | RR | #aff | freq | #ctrl | freq |
| SECOND ICELANDIC: | NS | 1.048 | 240 | 0.079 | 508 | 0.076 |
| Non-obese T2D | | | | | | |
| SECOND ICELANDIC: | 0.035 | 1.479 | 171 | 0.108 | 508 | 0.076 |
| Obese T2D | | | | | | |
| USA Caucasian: | NS | 0.976 | 136 | 0.070 | 168 | 0.071 |
| Non-obese T2D | | | | | | |
| USA Caucasian: | 0.009 | 2.097 | 90 | 0.139 | 168 | 0.071 |
| Obese T2D | | | | | | |

[0356] SG05S808 belongs to class of SNPs that are perfect surrogates to each other.

| SNP | B34 location |
|---|---|
| SG05S792 | 170048790 |
| SG05S1234 | 170052262 |
| SG05S1237 | 170055870 |
| SG05S808 | 170059078 |
| SG05S814 | 170061607 |
| SG05S1239 | 170062143 |
| SG05S820 | 170063925 |
| SG05S824 | 170065310 |
| SG05S1242 | 170066796 |

Correlation with Serum Insulin Levels

[0357] The demonstration of a role for KChIP1 in insulin secretion led us to determine if the T-allele of the SNP SG05S808, shown above to be associated with T2D in Iceland and the US, showed a negative correlation to serum insulin levels in T2D cases. A study cohort of 747 T2D patients, representing a large subset of those analyzed in the initial association study was used in this analysis. All had basal fasting insulin levels measured that were subsequently log-transformed. The patients were GAD negative to exclude patients with LADA (latent autoimmune diabetes in adults, a form of Type I diabetes) and not on any insulin treatment to exclude any confounding influence on the serum insulin measurements. For the obese T2D cohort (n=326), a significant negative correlation was observed, with a reduction in log-transformed serum insulin levels with increasing copy number of the SG05S808 at-risk T allele (one-sided p-value=0.02). Note that we report a one-sided p-value for this correlation as we postulated that the correlation would be negative with respect to insulin levels.

[0358] Excluding medicated T2D patients from the analysis, a border-line significant negative correlation continued to be observed in 153 obese T2D cases, with increasing copy number of the SG05S808 at-risk T allele (one-sided p-value=0.055)—the p-value is higher due to the fewer numbers analyzed in this set.

TABLE 26
SURROGATE SNPs IDENTIFIED BY ADDITIONAL RESEQUENCING

| | | SEQ | | |
|---|---|---|---|---|
| Build 33 | DECODE | PROJECT | | |
| Pos | ALIAS | ALIAS | AMPLIMER SEQUENCE LISTING | SNP |
| 1700034438 | SG05S792 | KCP_146328 | GTGTGTGCCAGGCATGTTCATGTATA | A/G |
| | | | TTCAGGAAGAAGTGTCAGTATTTAAG | |
| | | | ATCCTCGGCCCTTGCCCGAGTCCCCA | |
| | | | ACACGCCTTCTTGTCTGGAGAACTGT | |
| | | | AAATCTTGGAAACATCTTGCAAGGG | |
| | | | GGGACACCTCACAGAAGGCAGGCTT | |
| | | | GGCATGGGATAAACAGAATCGACTC | |
| | | | CTCTGCTTCCTTCTGATGCAC[A/G]GT | |
| | | | GAATGGGCAGGTGGAAGCATCGTTG | |
| | | | CTTAAAGAGGAACCAAAACTCCACC | |
| | | | CCAGAGCTGCTAATTCCTTTTGGCTT | |
| | | | GCAGTTATGCAGAGGGCTAAAAAAT | |
| | | | CCAACGAATCACAAATCCCCTGGTTG | |
| | | | CTAAGTAGAAAGAATATGTTTTGGCT | |
| | | | GCTGCTGTTCCCTTCCCCAAGGAAAA | |
| | | | GATTCAAGCAGAGGCGGTC | |
| | | | (SEQ ID NO: 666) | |
| 170006910 | SG05S1234 | KCP_149800 | CTTCAAGTGCCACCTTCATCCCATTC | A/G |
| | | | TTTCTGCAAATATTCACCACACACCT | |
| | | | ACGTGACCTCAGGCTCTGTGTCAGGT | |
| | | | CCTGGGGATGTAATGGTGTCCATGAA | |
| | | | GAAACAAGGTCCCTGCCCTCATAGA | |
| | | | GTGGCCTGACATATGCCCGAG | |
| | | | GCAGTCAGCAGCCGAGTGCGGGAGA | |
| | | | CTCTTGAGCAGAGATTGAGTGTGTT[A/ | |
| | | | G]ATATCTGTAGGCATCAGCCTGGC | |
| | | | TTTGCTGAGTGAGCTATATCAGAGTG | |
| | | | GAGGAGGCCAGAGGCAAAGTCCAGA | |
| | | | CTCCACTGGATCCTGGATTGAGGGGA | |
| | | | GAAGGGGCTGGGCGGAGGAGCAGCC | |
| | | | TGAGCACCTGCATCTCACTCCAACTG | |
| | | | GGTGCTGATTTGTCCCCATGGCCCCA | |
| | | | GCACCCAGGCAGGTCACCAAGTA | |
| | | | (SEQ ID NO: 677) | |
| 170010518 | SG05S1237 | KCP_153408 | AGAAGTTGGAATTCATTAAAATTTAA | C/T |
| | | | ACCTCTGCCCTGTAAAAGGCAATGTT | |
| | | | AAGAGAATGAGAAAATAAGCCACAG | |
| | | | ACTGGGAAAAAATATTTGAAAAAAT | |
| | | | ATATATCTGATAAAGGACTGTTATTC | |
| | | | AAAGCATACAAAGAACTCTTAAAAA | |
| | | | TCAATAATTAGAAAATTAAAAATCTG | |
| | | | ATTCAAAAATAAGCAGAAGAC[C/T]C | |
| | | | GAACAGACATTTCACCAAGGAAGAT | |
| | | | ATACAGATGGCAAGTAAGCATGTGA | |
| | | | AAAAATGCTCCACATATGTCATTAGG | |
| | | | GAATTGCTAATTAAAACAATGATGA | |
| | | | GATGCCACTACAGAACTCATAGAAT | |
| | | | GGCCAATATCCAAAACACTTAACAA | |
| | | | CACAAAATGTAGGTGAGAATGTGGA | |
| | | | GAAACAGGAACTCTCATCAGTGC | |
| | | | (SEQ ID NO: 689) | |
| 170013726 | SG05S808 | KCP_156616 | CACATTCTAATTAGGAGCTTCTGAAC | C/T |
| | | | CCAAAGGAATTTCAGATAAGGGGAA | |
| | | | ATTTAGGCCCAAAGCCAGGAGAAGG | |
| | | | GGTGAGTAGGGCTTGATCTCTGCCTC | |
| | | | TGAAGGGCAGAGGGCGTGGACTATT | |
| | | | CTTGGCTCTTAGGGGACAGCTAGAG | |
| | | | AAATGTGGGTCTCATGGCGACAACTC | |
| | | | TGGACTCCATTGGAAGAACCTT[C/T]T | |
| | | | AACAGTCAGGGCTCCCAGAGATAAC | |
| | | | TAGACAAGTCACCAAGAGAGGCAGT | |
| | | | GGGTACCCCTCACAGGAGGGGTGCA | |
| | | | AATCAAAGCCAAGGCTTGGAGTGGA | |
| | | | CCATATTAAATCCATTTCTTATCCTGT | |
| | | | GATTCTTAGAGTCCTATCTGTATCAG | |
| | | | GGGAAGGCAGGTGGGTTCTAGAACT | |
| | | | TTCTAAATGTGTCCCTGTGG | |
| | | | (SEQ ID NO: 696) | |
| 170016255 | SG05S814 | KCP_159145 | GGCTACAAATGAATGTAAAAATCTCT | A/G |
| | | | AATTTAGTGCCAAGTAACAGAAAAC | |
| | | | AGCTCTACTTATCTTAAGCCAAAAAG | |
| | | | AGGGACTTCTCAGAGGCATACTAAT | |
| | | | GGAGGATGGCAAGAGGGCCTCACGT | |
| | | | GGAACCAGGGCCTGGAGCGGCACAG | |
| | | | CATTCAGGAAGCTCAGTCTCCTTCTC | |
| | | | TCTCTCTCTCTCATCTCTGCTT[A/G]TT | |
| | | | TCCCTTTACCTGTAGACATGCTATCA | |
| | | | TTTTTCCAATATCCATGGCAGAATGT | |
| | | | GGCCACCAGTAACTCCAGGTGTATA | |
| | | | ACAGAAGCCTGGCCTC | |
| | | | CCAGGAGAGGGTGACTTGATGCCCTT | |
| | | | AGCTCCAGCCTTCCACTCCCACCCTG | |
| | | | GGCCAAGCAACTGGTGGCCAGGAGG | |
| | | | AGCTCATATTGCAGGAATATTGAAAT | |
| | | | TT | |
| | | | (SEQ ID NO: 704) | |
| 170016791 | SG05S1239 | KCP_159681 | TGCACCAGTGCCCAAGTCTGTCACTC | A/G |
| | | | CCTCCTCTCATTCTGAAACATCCTCT | |
| | | | GCACTCCATTCACCAGTGCCAAGCCT | |
| | | | TGCCCTTCTTCAGGGTTCAACTTTGT | |
| | | | CCCACCTTCTCTGAGAAGGCTGCCCT | |
| | | | GGTCCCTGCAACCGCTATGA | |
| | | | GCTGCCTTTTCTGAGCTCTTCTGCTGT | |
| | | | GGAGGATCCATGCCATTGACCTA[A/G] | |
| | | | GCACCCGTTTTCCACATATTGAGCAT | |
| | | | TGCTGAGCACCTATTCTGTGCCAGGC | |
| | | | ACTGTGCTTCAGGGCCATGGGGGAT | |
| | | | GCTCCAAGCGGTAAAATG | |
| | | | CAACCAAAGCCCCGAAGGAGCTCAC | |
| | | | ATTCTAGTCATGTCCACAAAGAGGTA | |
| | | | ATAAATCCATAAATTGTATGTACTAT | |
| | | | TCTAGTCACAATAAAATTGTGTCGTA | |
| | | | CT | |
| | | | (SEQ ID NO: 706) | |
| 170018573 | SG05S820 | KCP_161463 | AAGAAACCAGCCTCTCTCAAATCAAT | C/T |
| | | | CAGTCATCTTGCTCATTGACCAATGG | |
| | | | TTCGGCCACCCGGCAAGAAATTAGA | |
| | | | AAAATCTATGCATAGGAGAAAGCTT | |
| | | | TCCAACAGCCCTGGAAAGGCCTTGG | |
| | | | GCCCCAAAGGGCTAGTATGAGGTTG | |
| | | | AGGTGGGGGAGAGCAAGAGAGGAC | |
| | | | AAAACAGGCTGGGTACTGACCTTC[C/ | |
| | | | T]TCGTACTCCATGGCTCAGAACTCTG | |
| | | | ACCTCTTGCCAACCTGCCTTCCGCAA | |
| | | | GCAGCGAGAGTAGCACGGCTCTGAG | |
| | | | GGGCATGGCCAGGGAGGATGTGACC | |
| | | | TCTAAGTGCTCCAAGTCACTGGGAAC | |
| | | | CCTGTTCTAATAATAGGCAAAGCTTC | |
| | | | AGTTGATGGAGTGCCTATATGGGCCC | |
| | | | AGCCCTGTGAACAGCTTCCTC | |
| | | | (SEQ ID NO: 713) | |
| 170019958 | SG05S824 | KCP_162848 | GTCTTGAACTCCTGACCTCAGGTGAT | C/G |
| | | | CTGAGCACCTCGATCTCCCAAAGTCC | |
| | | | TGGGATTACAGGTGTGAGTCACCATG | |
| | | | CCCAGCCAACTCAGTAAGTCTTTTGA | |
| | | | ATGTGAGCGGAGGCCCCCAGTCAGC | |
| | | | ATTTCCAAGACCTGGGAAATG | |
| | | | AGGGTGAGGAGGGGGCCAAGAGCTC | |
| | | | TGATTTCAAGTCCCAGCCCTGCCAC | |
| | | | [C/G]CATTCCTTAGGGCAGGCACCCAC | |
| | | | CACCGCCTTGGCTCAGGCCTCAGTTT | |
| | | | CCATCTGGAAGGTGCTGGCTGCCTTG | |
| | | | ATGGGCCTCTATGGGCCCTC | |
| | | | CAGCTCTGTGGCTCCATGTCAAATGC | |
| | | | CCCTGACCACCCTTGAGATTAACCCT | |
| | | | TTCCCAAGGATAGACAGCTTCCCCCA | |
| | | | TCATTCTAGATCCCTCACACTTCCCC | |
| | | | A | |
| | | | (SEQ ID NO: 267) | |
| 170021444 | SG05S1242 | KCP_164334 | GCATCCAGGCCACAGCAAAAGCATG | A/G |
| | | | AGACATACTTGGTGAGTGAGCAAGA | |
| | | | GAATGGAAGAAGAAATCAATGGAGC | |
| | | | CAAATGACTCCACCAGATTTGCATTT | |
| | | | GAGACGGTCACTGCAAGACTGCACC | |
| | | | AGTCCCAAATTCCCAAGACAGCAAT | |
| | | | GTTTTCCACGATGGGTCTGAACATGT | |
| | | | AACCATTCTCAGGTTCCTGTTGG[A/G] | |
| | | | GGTTTGGGAGCCTAGAAACTGAGAC | |
| | | | AGCCTCACAGCTGACAGATCACGAG | |
| | | | CAGCCATCTAAGTCGACGTTTCCAAA | |
| | | | GTCATGGGGCCTATGGTTTGTGAGCT | |
| | | | TATTTAGGTTGTCCCCGGGCCCAGCA | |
| | | | TCAAAAGCATTGAGACACGTACTGA | |
| | | | GGGACTCTTTTCCTAGCCTCTCAGTC | |
| | | | CTGACTGCTCAAGGACCAAGT | |
| | | | (SEQ ID NO: 718) | |

### REFERENCES

[0359] Altshuler, D., J. N. Hirschhorn, et al. (2000). “The common PPARgamma Pro12Ala polymorphism is associated with decreased risk of type 2 diabetes.” Nat. Genet., 26(1): 76-80.
[0360] Amos, A. F., D. J. McCarty, et al. (1997). “The rising global burden of diabetes and its complications: estimates and projections to the year 2010.” Diabet. Med., 14 Suppl 5: S1-85.
[0361] An, W. F., M. R. Bowlby, et al. (2000). “Modulation of A-type potassium channels by a family of calcium sensors.” Nature, 403(6769): 553-6.
[0362] Bagger, Y. Z., B. J. Riis, et al. (2001). “Risk factors for development of osteoporosis and cardiovascular disease in postmenopausal Danish women: The PERF Study.” J Bone Miner. Res. Suppl. 1: 1-396.
[0363] Barnett, A. H., C. Eff, et al., (1981). “Diabetes in identical twins. A study of 200 pairs.” Diabetologia 20(2): 87-93.
[0364] Beck, E. J., M. Bowlby, et al., (2002). “Remodelling inactivation gating of Kv4 channels by KChIP1, a small-molecular-weight calcium-binding protein.” J Physiol 538(Pt 3): 691-706.
[0365] Chang, L. S., C. Y. Chen, et al., (2003). “Functional implication with the metal-binding properties of KChIP1.” Biochem Biophys Res Commun 311(2): 258-63.
[0366] Dornhorst, A. and P. K. Merrin (1994). “Primary, secondary and tertiary prevention of non-insulin-dependent diabetes.” Postgrad. Med. J., 70(826): 529-35.
[0367] Falk, C. T. and P. Rubinstein (1987). “Haplotype relative risks: an easy reliable way to construct a proper control sample for risk calculations.” Ann. Hum. Genet., 51 (Pt 3): 227-33.
[0368] Gerich, J. E. (2002). “Is reduced first-phase insulin release the earliest detectable abnormality in individuals destined to develop type 2 diabetes?” Diabetes, 51 Suppl 1: S117-21.
[0369] Gloyn, A. L. (2003). “The search for type 2 diabetes genes.” Ageing Res Rev 2(2): 111-27.
[0370] Gloyn, A. L., M. N. Weedon, et al. (2003). “Large-scale association studies of variants in genes encoding the pancreatic beta-cell KATP channel subunits Kir6.2 (KCNJ11) and SUR1 (ABCC8) confirm that the KCNJ11 E23K variant is associated with type 2 diabetes.” Diabetes, 52(2): 568-72.
[0371] Gretarsdottir, S., G. Thorleifsson, et al. (2003). “The gene encoding phosphodiesterase 4D confers risk of ischemic stroke.” Nat. Genet. 35(2): 131-8.
[0372] Gulcher, J. R., K. Kristjansson, et al. (2000). “Protection of privacy by third-party encryption in genetic research in Iceland.” Eur. J. Hum. Genet. 8(10): 739-42.
[0373] Hatano, N., S. Ohya, et al. (2002). “Functional interaction between KChIP1 and GFP-fused Kv4.3L co-expressed in HEK293 cells.” Pflugers Arch 444(1-2): 80-8.
[0374] Hill, W. G. and A. Robertson (1968). “The effects of inbreeding at loci with heterozygote advantage.” Genetics, 60(3): 615-28.
[0375] Horikawa, Y., N. Oda, et al. (2000). “Genetic variation in the gene encoding calpain-10 is associated with type 2 diabetes mellitus.” Nat. Genet. 26(2): 163-75.
[0376] Knowler, W. C., D. J. Pettitt, et al. (1990). “Diabetes mellitus in the Pima Indians: incidence, risk factors and pathogenesis.” Diabetes Metab. Rev. 6(1): 1-27.
[0377] Lewontin, R. C. (1964). “The Interaction of Selection and Linkage. Ii. Optimum Models.” Genetics 50: 757-82.
[0378] MacDonald, P. E., X. F. Ha, et al. (2001). “Members of the Kv1 and Kv2 voltage-dependent K(+) channel families regulate insulin secretion.” Mol. Endocrinol. 15(8): 1423-35.
[0379] MacDonald, P. E. and M. B. Wheeler (2003). “Voltage-dependent K(+) channels in pancreatic beta cells: role, regulation and potential as therapeutic targets.” Diabetologia 46(8): 1046-62.
[0380] Newman, B., J. V. Selby, et al. (1987). “Concordance for type 2 (non-insulin-dependent) diabetes mellitus in male twins.” Diabetologia 30(10): 763-8.
[0381] O'Callaghan, D. W., B. Hasdemir, et al. (2003). “Residues within the myristoylation motif determine intracellular targeting of the neuronal Ca2+ sensor protein KChIP1 to post-ER transport vesicles and traffic of Kv4 K⁺ channels.” J. Cell. Sci. 116(Pt 23): 4833-45.
[0382] Ory, D. S., B. A. Neugeboren, et al. (1996). “A stable human-derived packaging cell line for production of high titer retrovirus/vesicular stomatitis virus G pseudotypes.” Proc. Natl. Acad. Sci. USA 93(21): 11400-6.
[0383] Philipson, L. H., M. P. Rosenberg, et al. (1994). “Delayed rectifier K+ channel overexpression in transgenic islets and beta-cells associated with impaired glucose responsiveness.” J. Biol. Chem., 269(45): 27787-90.
[0384] Reynisdottir, I., G. Thorleifsson, et al. (2003). “Localization of a susceptibility gene for type 2 diabetes to chromosome 5q34-q35.2.” Am. J. Hum. Genet. 73(2): 323-35.
[0385] Reynisdottir, I., G. Thorleifsson, et al. (2003). “Localization of a susceptibility gene for type 2 diabetes to chromosome 5q34-q35.2.” Am. J. Hum. Genet. 73(2): 323-35.
[0386] Shibata, R., H. Misonou, et al. (2003). “A fundamental role for KChIPs in determining the molecular properties and trafficking of Kv4.2 potassium channels.” J. Biol. Chem., 278(38): 36445-54.
[0387] Terwilliger, J. D. and J. Ott (1992). “A haplotype-based ‘haplotype relative risk’ approach to detecting allelic associations.” 42(6): 337-46.
[0388] Tuomi, T., A. Carlsson, et al. (1999). “Clinical and genetic characteristics of type 2 diabetes with and without GAD antibodies.” Diabetes, 48(1): 150-7.
[0389] Zimmet, P., R. Taylor, et al. (1983). “Prevalence of diabetes and impaired glucose tolerance in the biracial (Melanesian and Indian) population of Fiji: a rural-urban comparison.” Am. J. Epidemiol., 118(5): 673-88.

[0390] The teachings of all publications cited herein are incorporated herein by reference in their entirety. While this invention has been particularly shown and described with references to preferred embodiments thereof, it will be understood by those skilled in the art that various changes in form and details may be made therein without departing from the scope of the invention encompassed by the appended claims.

1. A method of diagnosing a susceptibility to Type II diabetes in an individual, comprising detecting a polymorphism in a KChIP1 nucleic acid, wherein the presence of the polymorphism in the nucleic acid is indicative of a susceptibility to Type II diabetes.

2. A method of diagnosing a susceptibility to Type II diabetes comprising detecting an alteration in the expression or composition of a polypeptide encoded by KChIP1 nucleic acid in a test sample, in comparison with the expression or composition of a polypeptide encoded by a KChIP1 nucleic acid in a control sample, wherein the presence of an alteration in expression or composition of the polypeptide in the test sample is indicative of a susceptibility to Type II diabetes.

3. The method of claim 1, wherein the polymorphism in the KChIP1 nucleic acid is indicated by detecting the presence of a least one of the polymorphisms indicated in Table 13.

4. The method of claim 1, wherein the polymorphism in the KChIP1 nucleic acid is indicated by detecting the presence of a least one of the polymorphisms indicated in Table 26.

5. An isolated nucleic acid molecule comprising a KChIP1 nucleic acid, wherein the KChIP1 nucleic acid has a nucleotide sequence selected from the group of nucleic acid sequences as shown in Table 10, or the complements of the group of nucleic acid sequences as shown in Table 10, wherein the nucleotide sequence contains a polymorphism.

6. An isolated nucleic acid molecule which hybridizes under high stringency conditions to a nucleotide sequence selected from the group of nucleic acid sequences as shown in Table 10, or the complements of the group of nucleic acid sequences as shown in Table 10, wherein the nucleotide sequence contains a polymorphism.

7. A method for assaying for the presence of a first nucleic acid molecule in a sample, comprising contacting said sample with a second nucleic acid molecule, where the second nucleic acid molecule comprises a nucleotide sequence selected from the group consisting of: nucleic acid sequences as shown in Table 10 and the complement of the nucleic acid sequences as shown in Table 10, wherein the nucleotide sequence contains a polymorphism and hybridizes to the first nucleic acid under high stringency conditions.

8. A vector comprising an isolated nucleic acid molecule selected from the group consisting of:
a) nucleic acid sequences as shown in Table 10; and
b) complement of one of the nucleic acid sequences are shown in Table 10; and
wherein the nucleic acid molecule contains a polymorphism and is operably linked to a regulatory sequence.

9. A recombinant host cell comprising the vector of claim 7.

10. A method for producing a polypeptide encoded by an isolated nucleic acid molecule having a polymorphism, comprising culturing the recombinant host cell of claim 8 under conditions suitable for expression of the nucleic acid molecule.

11. A method of assaying for the presence of a polypeptide encoded by an isolated nucleic acid molecule according to claim 5 in a sample, the method comprising contacting the sample with an antibody which specifically binds to the encoded polypeptide.

12. A method of identifying an agent that alters expression of a KChIP1 nucleic acid, comprising:
a) contacting a solution containing a nucleic acid comprising the promoter region of the KChIP1 nucleic acid operably linked to a reporter gene with an agent to be tested;
b) assessing the level of expression of the reporter gene; and
c) comparing the level of expression with a level of expression of the reporter gene in the absence of the agent; wherein if the level of expression of the reporter gene in the presence of the agent differs, by an amount that is statistically significant, from the level of expression in the absence of the agent, then the agent is an agent that alters expression of the KChIP1 nucleic acid.

13. An agent that alters expression of the KChIP1 nucleic acid, identifiable according to the method of claim 12.

14. A method of identifying an agent that alters expression of a KChIP1 nucleic acid, comprising:
a) contacting a solution containing a nucleic acid of claim 1 or a derivative or fragment thereof with an agent to be tested;
b) comparing expression with expression of the nucleic acid, derivative or fragment in the absence of the agent;
wherein if expression of the nucleotide, derivative or fragment in the presence of the agent differs, by an amount that is statistically significant, from the expression in the absence of the agent, then the agent is an agent that alters expression of the KChIP1 nucleic acid.

15. The method of claim 14, wherein the expression of the nucleotide, derivative or fragment in the presence of the agent comprises expression of one or more splicing variant(s) that differ in kind or in quantity from the expression of one or more splicing variant(s) the absence of the agent.

16. An agent that alters expression of a KChIP1 nucleic acid, identifiable according to the method of claim 15.

17. An agent that alters expression of a KChIP1 nucleic acid, selected from the group consisting of: antisense nucleic acid to a KChIP1 nucleic acid; a KChIP1 polypeptide; a KChIP1 nucleic acid receptor; a KChIP1 binding agent; a peptidomimetic; a fusion protein; a prodrug thereof; an antibody; and a ribozyme.

18. A method of altering expression of a KChIP1 nucleic acid, comprising contacting a cell containing a KChIP1 nucleic acid with an agent of claim 17.

19. A method of identifying a polypeptide which interacts with a KChIP1 polypeptide comprising a polymorphism indicated in Table 13 or Table 26, comprising employing a yeast two-hybrid system using a first vector which comprises a nucleic acid encoding a DNA binding domain and a KChIP1 polypeptide, splicing variant, or a fragment or derivative thereof, and a second vector which comprises a nucleic acid encoding a transcription activation domain and a nucleic acid encoding a test polypeptide, wherein if transcriptional activation occurs in the yeast two-hybrid system, the test polypeptide is a polypeptide which interacts with a KChIP1 polypeptide.

20. A Type II diabetes therapeutic agent selected from the group consisting of: a KChIP1 nucleic acid or fragment or derivative thereof; a polypeptide encoded by a KChIP1 nucleic acid; a KChIP1 receptor; a KChIP1 nucleic acid binding agent; a peptidomimetic; a fusion protein; a prodrug; an antibody; an agent that alters KChIP1 nucleic acid expression; an agent that alters activity of a polypeptide encoded by a KChIP1 nucleic acid; an agent that alters posttranscriptional processing of a polypeptide encoded by a KChIP1 nucleic acid; an agent that alters interaction of a KChIP1 nucleic acid with a KChIP1 binding agent; an agent that alters transcription of splicing variants encoded by a KChIP1 nucleic acid; and a ribozyme.

21. A pharmaceutical composition comprising a Type II diabetes therapeutic agent of claim 20.

22. The pharmaceutical composition of claim 21, wherein the Type II diabetes therapeutic agent is an isolated nucleic acid molecule comprising a KChIP1 nucleic acid or fragment or derivative thereof.

23. The pharmaceutical composition of claim 21, wherein the Type II diabetes therapeutic agent is a polypeptide encoded by the KChIP1 nucleic acid.

24. A method of treating a disease or condition associated with KChIP1 in an individual, comprising administering a Type II diabetes therapeutic agent to the individual, in a therapeutically effective amount.

25. The method of claim 24, wherein the Type II diabetes therapeutic agent is a KChIP1 nucleic acid agonist.

26. The method of claim 24 wherein the Type II diabetes therapeutic agent is a KChIP1 nucleic acid antagonist.

27. A transgenic animal comprising a nucleic acid selected from the group consisting of: an exogenous KChIP1 nucleic acid and a nucleic acid encoding a KChIP1 polypeptide.

28. A method for assaying a sample for the presence of a KChIP1 nucleic acid, comprising:
a) contacting said sample with a nucleic acid comprising a contiguous nucleotide sequence which is at least partially complementary to a part of the sequence of said KChIP1 gene under conditions appropriate for hybridization, and
b) assessing whether hybridization has occurred between a KChIP1 gene nucleic acid and said nucleic acid comprising a contiguous nucleotide sequence which is at least partially complementary to a part of the sequence of said KChIP1 nucleic acid;
wherein if hybridization has occurred, a KChIP1 nucleic acid is present in the nucleic acid.

29. The method of claim 28, wherein said nucleic acid comprising a contiguous nucleotide sequence is completely complementary to a part of the sequence of said KChIP1 nucleic acid.

30. The method of claim 28, further comprising amplification of at least part of said KChIP1 nucleic acid.

31. The method of claim 28, wherein said contiguous nucleotide sequence is 100 or fewer nucleotides in length and is either: a) at least 80% identical to a contiguous sequence of nucleotides in one of the nucleic acid sequences as shown in Table 10; b) at least 80% identical to the complement of a contiguous sequence of nucleotides in one of the nucleic acid sequences as shown in Table 10; or c) capable of selectively hybridizing to said KChIP1 nucleic acid.

32. A reagent for assaying a sample for the presence of a KChIP1 nucleic acid, said reagent comprising a nucleic acid comprising a contiguous nucleotide sequence which is at least partially complementary to a part of the nucleotide sequence of said KChIP1 nucleic acid.

33. The reagent of claim 32, wherein the nucleic acid comprises a contiguous nucleotide sequence, which is completely complementary to a part of the nucleotide sequence of said KChIP1 nucleic acid.

34. A reagent kit for assaying a sample for the presence of a KChIP1 nucleic acid, comprising in separate containers:
a) one or more labeled nucleic acids comprising a contiguous nucleotide sequence which is at least partially complementary to a part of the nucleotide sequence of said KChIP1 nucleic acid, and
b) reagents for detection of said label.

35. The reagent kit of claim 34, wherein the labeled nucleic acid comprises a contiguous nucleotide sequences which is completely complementary to a part of the nucleotide sequence of said KChIP1 nucleic acid.

36. A reagent kit for assaying a sample for the presence of a KChIP1 nucleic acid, comprising one or more nucleic acids comprising a contiguous nucleic acid sequence which is at least partially complementary to a part of the nucleic acid sequence of said KChIP1 nucleic acid, and which is capable of acting as a primer for said KChIP1 nucleic acid when maintained under conditions for primer extension.

37. The use of a nucleic acid which is 100 or fewer nucleotides in length and which is either: a) at least 80% identical to a contiguous sequence of nucleotides in one of the nucleic acid sequences as shown in Table 10; b) at least 80% identical to the complement of a contiguous sequence of nucleotides in one of the nucleic acid sequences as shown in Table 10; or c) capable of selectively hybridizing to said KChIP1 nucleic acid, for assaying a sample for the presence of a KChIP1 nucleic acid.

38. The use of a first nucleic acid which is 100 or fewer nucleotides in length and which is either:
a) at least 80% identical to a contiguous sequence of nucleotides in one of the nucleic acid sequences as shown in Table 6;
b) at least 80% identical to the complement of a contiguous sequence of nucleotides in one of the nucleic acid sequences as shown in Table 10; or
c) capable of selectively hybridizing to said KChIP1 nucleic acid; for assaying a sample for the presence of a KChIP1 nucleic acid that has at least one nucleotide difference from the first nucleic acid.

39. The use of a nucleic acid which is 100 or fewer nucleotides in length and which is either:
a) at least 80% identical to a contiguous sequence of nucleotides in one of the nucleic acid sequences as shown in Table 10;
b) at least 80% identical to the complement of a contiguous sequence of nucleotides in one of the nucleic acid sequences as shown in Table 10; or
c) capable of selectively hybridizing to said KChIP1 nucleic acid; for diagnosing a susceptibility to a disease or condition associated with a KChIP1.

40. A method of diagnosing a susceptibility to Type II diabetes in an individual, comprising determining the presence or absence in the individual of a haplotype comprising a halotype shown in Table 2, Table 4, Table 5, Table 14, Table 16, Table 17 and Table 18 at the 5q35 loci, wherein the presence of the haplotype is diagnostic of susceptibility to Type II diabetes.

41. The method of claim 40, wherein the haplotype comprises a least one of the polymorphisms indicated in Table 26.

42. The method of claim 40, wherein determining the presence or absence of the haplotype comprises enzymatic amplification of nucleic acid from the individual.

43. The method of claim 40, wherein determining the presence or absence of the haplotype further comprises electrophoretic analysis.

44. The method of claim 40, wherein determining the presence or absence of the haplotype further comprises restriction fragment length polymorphism analysis.

45. The method of claim 40, wherein determining the presence or absence of the haplotype further comprises sequence analysis.

46. A method of diagnosing a susceptibility to Type II diabetes in an individual, comprising:
a) obtaining a nucleic acid sample from said individual; and
b) analyzing the nucleic acid sample for the presence or absence of a haplotype, comprising a haplotype shown in Table 2, Table 4, Table 5, Table 14, Table 16, Table 17 or Table 18 at the 5q35 loci comprising a KChIP1 gene, wherein the presence of the haplotype is diagnostic for a susceptibility to Type II diabetes.

47. The method of claim 46, wherein the haplotype comprises the presence of a least one of the polymorphisms indicated in Table 26.

48. A method of diagnosing a susceptibility to Type II diabetes in an individual, comprising determining the presence or absence in the individual of a haplotype comprising one or more markers and/or single nucleotide polymorphisms as shown in Table 13 in the locus on chromosome 5q35, wherein the presence of the haplotype is diagnostic of a susceptibility to Type II diabetes.

49. The method of claim 48, wherein haplotype comprises the presence of a least one of the polymorphisms indicated in Table 26.

50. A method for the diagnosis and identification of a susceptibility to Type II diabetes in an individual, comprising: screening for an at-risk haplotype in the KChIP1 nucleic acid that is more frequently present in an individual susceptible to Type II diabetes compared to an individual who is not susceptible to Type II diabetes wherein the at-risk haplotype increases the risk significantly.

51. The method of claim 50, wherein the KChIP1 nucleic acid comprises at least one of the polymorphisms indicated in Table 26.

52. The method of claim 50 wherein the significant increase is at least about 20%.

53. The method of claim 50 wherein the significant increase is identified as an odds ratio of at least about 1.2.

54. Use of a Type II diabetes therapeutic agent for the manufacture of a medicament for the treatment of a disease or condition associated with KChIP1 in an individual.

55. The use of claim 54, wherein the Type II diabetes therapeutic agent is a KChIP1 nucleic acid agonist.

56. The use of claim 55, wherein the Tpe II diabetes therapeutic agent is a KChIP1 antagonist.

57. A method of diagnosing a predisposition or susceptibility to Type II diabetes in a subject, comprising detecting the presence or absence of a genetic marker associated with the KChIP1 gene, the marker having a p-value of 1×10⁻⁵ or less, wherein the presence of the marker associated with the KChIP1 gene is indicative of a predisposition or susceptibility to Type II diabetes.

The application's sequence listing, which the Patent Office published only in electronic form, follows.

SEQUENCE LISTING (979 sequences)

SEQ ID NO: 1 - DNA, 382259 bp, Homo sapiens
  misc_feature 382259: n = A,T,C or G
caggagtgggtggagagagggagggagagtttgccctgcaggctctctggatgcagaagccagactcgctgcagaggcagctgtgctgttcccggagcctggcttcaggggtgcatccgtcactcagggttcattcacccaggcaggctccaagttcctggggtgcacaaggtgggcactgtcccttctgggtgctgacagcagagcctggctcccctccgccaccatgagcggctgctccaaaagatgcaagcttgggttcgtgaaatttgcccagaccatctttaagctcatcactgggaccctcagcaaaggtatggaaactggccttgacccttgctttctgtcttgatatggcctggctggtcgcattgcctcggtgtggtgagcgtgaccattctggtgcacccaggtcttggaaaaagctggggaaattggtggctgggattcgaggttgctgacaacctgcgtcctggctttgagtaggcgggcacccagccagggaactcagctggctgtaattgcctggaactttggaaatggagttggtggtgtgtggctgatacgttatgggcgggcagagggatagaaccctttccagagcattggaagtggcttagcgtgactggagtttcaagaagttatccatggaaggttgtattttgttgataaaagagagatttgatgcagtgggttgtgagtaattctgcagaacagagacgcttgagggggccagtgggaggtggtgatgggccggcatctgctttgccctggtggcttcagaaaccggatcagctctgcacctcaagtgccaagagcctcctctcatagggttccagcgtctcgtgcttctggggcttcattcatcgttctgctttcttggatccctgtccctccacatttcatgcctatgtccatgcctgtcttttctgcttctccaggaactggggtggcaggtggtttgcaggagtaactgtctgggcagatcagaaagtgtggctatggaccagaattagggctgcagccccagatgggcccacagccgggaggcagaaagaaggctaactcctcagggcccagtcctgtgtcttaaaccccattttacacttggcaccagggaaggtgaggccctcagaggggtctggccaactttgtggagatgatgtcaagggagagcagcagcatgatgtggttccactggctgaaaaaacgtctttaaatattcatgctgtctttcaggaagagtctttgggggctggggagagaggcactggaagcagcaggcagaatattcagggaaggagcccacaaaactttgatgggattttacaaaatgacaatgagagcagagaaaggctatatgcagccagatctcatgacatggctcaggtgcccgccacccagcgggtctggcccagtgtacgttgtgtggcatgtgtgggtggtgggaatgatgggattctgtttatctccttccttgggatgttctgaccttcctgttatttccctaccatccttctgaagtggggcactgctcttccaagatacccaggtgggctgagcccccaatgtggagggccaggctgcctggcagaattcctggaggccagaagtggggtaaacaggaggttaatgggtatagctgtgattgctctcagtggctttacctcctggagaaggagaaagcaaaggggttaggaaatttcacaaagtctccccattcaatcctcagagacagctggaaggttttctttcctcattacagatagcaggacctaagagggtaatgggtgtggggcagcaacccattgcagcctctcatggagggcttgtccccacctgcagtctagtggcgacccagaccccacacacagatgctccctggatgccacactgagtgctgagatgggggaatcatgggggtcaacaggcatagagaagagatgtctggggcagactaaggagtgcctccaaacagtgacatctaagctgagatgaggagaggcagggctgagaaggtgggaggaagccgaagctgccagagggagcaacatcagagtgttggcctctgcaaggaaccagctggagagtcagaatgcctccctctctctgctcagaatcccagaaactaagatccatgtgacacagaagggactccgtggggacctggccttcctgtgaactgcttcagtacagcctttcctgtggccagggctcagagaggcagcccatggcaggcaccagggcaggattgtgtcttaaccgcatctgtcttctttgcttcagctccgcagagaggaccaagtgtttacacagccccggctctgcgccaggcacgtgctaggtgactggtgttctacccgatccaggtgtttgctaaatatttgttaaatagtgaggaacatgggagcagggccaggctgggagcagggtagctgagaaaggcctgcagagagtccagaaaacggctttctaatgtttacacctcccctaggtggatttagattcaaccctacatggatacattatgattgcttaatgatttctgattttaatttgatttcacttattcattattcattgcactgagttctagatttgcagtaatccaaccctcaggagagggatttttctttgtcccttgcagaactgaggaatgtaaagaatgtgttggaccaggtacctgcttgttctatggcaatttactgtttcttaccagccttgcaaatacctgggggacaaggagggtccaggatcaccctccctgtcctgcctgttcctaacccttggccacctcctgccatgccagaaatccttcttgccatttgtctaagatgccagctagcccagatttctcatcagcgcttattgcagagataaactgctcatgtccacctgctcacatatctcatcaaccttgaactttccttcctatccctgatcataatttgtggtctgcattccctttaggaacatgtttgctaaaggctctcttccccactagacttcagctccatcatggcaagaccatgtgcatttttttgctcaccactgtggccagagctactagcatggggcccagaatggagtatgtgtgttaccgtgttaaacgaatgcaacggcaccgcacggcacagacaccagccgtcagcctgagatgacccctggtacaggagctttctaggaagcactatgcaacacctgtcccacaggtgctcagcaaatgctctctgaagtctgtttagctgcagcaagctgagtctgcagcctccagcctccagcctgcgtgagcctccagccacgtaaaacattcaggctgggtctgagcttgcatagtgtctagggaagggcattaagattgttcccagaaggaaaggctgggtgggcaggcttctggcatccccactcccacccctctggctctatttttatttgttttatttactggatttctcccacatttaaagaatctctttggcattaaaaaaaaaaaaaatttcaaaccacgaatgcagtgaggagcacagttggtttctagactgagacatccccggaccctgcactgtggctcggaagcctcggactgggtccctcacctccctggcatttagtttcctcatctataaaatggaattacaatacccttcttatggggttgaatgagattgtgcagataaagctccctgcctattaggtgctcagtagtgttgatggatatgacttctgttattagcggatactctcatggttgagagcccctccgggctgggactccctctcactcattacttgttttctcagcaccaggcacagattctaagagcaacatctcatgatcactttatgaaagcctatggccttgtcagttactgcatgactttatttatttatttattttgaggcagggtctcattctgttccccaggctgagtgcagtgatgcaatcacggctcactgcagcctcgactttctgggctcaagcaatcctcccacctcagcctcctaaatagctgagaccacacatgtgcaccaccacaaccagctaattttgactgtttatagagacagggtctcactatgttgcccaggttgatgtcaaactcctggctcaagagaccctcctgccttgggctcccaaagtgctgggattacaggcatgagccaccacgtccagccactggatgactttagaccactgcttcccctctgctcaacttgttttcttaagggcctacccagagccatctccctcacctgattccttattaggagttaaaagcctgactcccagagccaggtcctcgcctgctgtttaacctaggagaagcccagctcctggctcggatgcttggtgaaatcaggggtctggggaacctgcgtcttcctctttctgcacagtcagctcccctccacccgcctcacagacttcctgggggccgctggcaggaaccagaagttgtgcaggctccattctggctggggaggtttaaactcatctccttctgcactgggaacaaatgttaccccaggcacagatgacagagccaaagtgagcagaagggaggaatccaatccaggagagcttctagtgtcctccaggccacccatgaggctgcgggggtggggaaaaggggtgtgggaagatgagatctatctcaaggacaaggccctggagccgtaactctcccctcccgcccaggcccaggctgttcctcttttttcgaggcaaaacctcagctgccccatcagtgacacactgttcctcttgcctcctcccactgctgttcaagatcctcaagagactgaccttggacccgggcatggactctgccttcaagcaggccaggctggagtaccaactctgcctcttaccagctgtgtgaagttgtgtcatttgaacaccaccccaagccaaggctccccacttttaattggagataataataatatcaatggcacaaggctgttttttaatgtaatgatgatatgagtaagagatatcagctcacaggcaaatcccaactctgctcttgcagggcacccgcccccgcttacattttgtgccctaggcaccttccttgcctctttctagtcttgatcctggaggtagggattgcaatcaccatttcagcaggtaaggaaactggggtttagctaagtgtcgtggctcccctggtgagtggcagagctgggattagaacccaggtcttgctgcagccaagacaaggtacattcctctgcactcctagggctggagaagtcacgcctgcctgcactactccccaccttgccaccagcagagagtcccccagcgtcccactaattctgttggtgggtttttccctgctgggtctgatcagagcagccacctgtcatgcaaagggttgtgacaaattccataaagtgtcatcacctgggttatggggaaagggaacactccagaggccaagatcagcaggacagccatacccatgctctctcagtatccctatcacctctcaggcaggtgtgcaggcccaaagcacctgccagacactgagtaggctctgtcccatgagggccactcccccatggctctcccttcttacaggccaagtgtgagaagtgttcttgggtgtgggaaaatacacacaaagttttggacactaggcaggctggaattgaggtgttgcagctgtttactggaattgtctgggaaagcagaagccttcacactggggactttgagacctgtgagatatcatcatccctctaccaagaggagaatgccacctgtcccatgaaaagctaagcttcaatgctgccccttgctggggaaagagagtccccaccatccgagtcctggctcgctcactgtcctggcagtgaggggctgagcaagcactctggtcatgttacaacagccccactcactctctgcaaccctggaacctctgagtgccagtgctttgtcacaggaagaaagtttgattatccagggcttctgggtccctgcctacctctccagccccaagctagagcctgccaggaggggcatgtgttcaccttggccctcctgatgtccagtagccttcatcccagcctactggcctcaccacccttgcccctctgcagcaggcccagcattccctgacccatttgggttgttcaggtgctcagctcactagggtctccatagtcccacagtagaaggcagagaagaaggagggatcacctgcccctctggagcctccgggtctttctcctagataaccctgttaccatgcaggagtaatttgttcagggccatttatcctggcactgctgcacagacatcctattaacttcaggaccacaggggagcggctagtttgctccaaattaaaagtagctggaaacggggccctctggcaggcaggagagttcaggctgccacaccacagccctgggagaagtggatctagtcaggtcttcatcagccttctaagtccagggcctcctttgccatgccacagggaccctcatcttccccagtcttcttagggttacagaatctcccctgggccatctctctcagcagacccaggtcccaaatccctgaaagcctttgcttcccaagggtggaagtggcgatgtgaagtcactgtggaaggaagcaggatgcagggcgggaaaactctggacccagagggacctgggctccaaccctgccatgcaccaacaggacagccttgggcaagccattccccatcttgagtctgtgtccttccgtaaatgggccagtaatttccatctcatgtggctactggagatggaatgagatgggacatgtgacaggcacaggacctggctcatacaagctgctcagtaaaagtcaagttccccacccttcttttctatgatacgaccttggatttgtagccaagagaaacaaggctgagcctctgtgggtcaagtcctcttcccagctcctatccagatgtgctgctatttcaaaattatcccccctgcccccagtcactcttgatgacaagttctataattaaaaatgtgccaacaatggaaatgatcctttttatttagttgttcatgggagaattggtcatccattctcatgagaatgggagccctgtgaaagcgttcaccacgttcaccacgtgggaatcacctagagtgagtgcctcaagcacctgcagccgaggaaggaaggttgaataaataacgactaaatgctttccctgccgagcaacatcaggccatgtggctggagttccctttttgaggtctggtcttagtcaggcttgctctggagcctaccactccctatctcccttgtctgaattcctgtgctggagtttgacagcagtgaccagccagaacgacctggatgagacaagggtcagtgcaaacaagaccaaaggcctgttcctgcccccattccgctctcatgctctgctgggggactgcccctgggtgcaggcccacactgcctatgcatcacagctggccaggtgctcaggtgaggcggcggttcttccccgttgtccacctgcaccccacccagaagtgcaggaggagggaccccactgaaaggcaggcagcaggggagaggagctttgggggagaggatgtggaaatgaggaaattgcataggcctcccgggccagctggaggaaagaaaggccaggactcctgaaaaagactcatgggaagtcatttactatcaccactgaccacgctctctgtcacaggtcttcagtctaggggcagaagaaagccttccttctctgttaggatgaggggaggaggaccatgaacacaaagctaaccttggtcccctctggctgaagccactgagattccattttgtgttcttagaagaacacccgctttggagccagacctgggtttgagtccaaatcctcacaactgcttgctgtcttaggccatcaggctgcttatcaacctgatggcctaagctaccatacaaagacacggtggcttatcaacaacagaaatgtatttctcacagttctggaagctggaagtctgagatcaggatgctagcactgtggacttctcgtggggactcttcctggcttacagacagcatctcctgctgtattctgacgtggaggaaagagagtaagctagctctctggcctcttcttatagacacaccccattcaagaggctccgccttcatgacctcatcacctcccaaaggccccaccttcaaataccatcacctcaggagtgggatttcaacatgtgaatttgggggacgggaggcacaaatattcagcccattgcactaagtaaatggcttttttttctgggcttcagtctcttcatctctaaaatgaaggagctgctgatttcaaaggcctctttcagctttggaatttaaagattaaacaaaattgcagcactgctggtggcacctgccatgtgcccagcattgcctgagcactccatgcccaatattttatttagtgcacatgagaaacctaggaggtggagtgctctaattaaccccacttacagatataaagagcgagcttcagacgggggaccggcctgcttggagtcacacagccagcatgaagcatagccacaactggaagcctaggcggtctggccccaagccctgggttttacttccctccccagcccatccccagtacactctttccatttctgaaaatcagatccagggtaagaagcaacgaagacaaaacagattccttcccagtttggccaagaggcaacacacactcttgttttcgaaatcaagacttcaggacctccattctgactgaggaagtgcaattgaggagaatgccctctgagactcaagctccccgatccatcccctaaaccgttacccataggtcacctttcacagtcaaacaacaaaacatatggggagcaggcccgacagccaagactacagggaggggagaaaaaaggaaacaccacccagcaagatttcctgttgtatttctagtctggccaattttcatttattgctggaatgaggtcagttggaagctgaggcagagaattgggcaggaatcaggtagggaggtgtgattctggggcttgtatctgagaagctggggttagcctaattttctttctgtaatcttttgattaactgtgggccagtttggatgacatttttcaaaccatctgtgcttggcaggctgggccgagcccaggcttactgctcggtgtctgcaaaactcagcttggagccggctatcacccggagcctgggatgtctctaagccatgaagcatattggattgcagaatgatccacaacatccctgtgctgattaactctgcccaggcctcacaagttcagaaacagtggctgtcatttcaaacgcaacaggaaacatgaggggaagggccatcgccatcctctgttgagtgctacctattttctgggggctttacaaggattcctatattcagtccagccctgtctctgtgagttgtttttattccaaaccaggggctttgagaggctgaataacttgccaacatcacagatacagcactgtggttgaaaaggtcatgtgcaaacactaatgttcctttgaacacgcctggtcaaacctgtcagcaccgtcacttctgtcacagactgaattgtgtccccttaaatgtgtatgtcaaagccctaacccccaaggtggctgtatttgatgatagggccttgatgcaggagattaaggttaaatgaggtcataaggttgggatcctaatccaacatgactggtgtccttgtaagaaggggaagagaccaggagtacacacacacagaggaaaagccatgtgagggcaagatggccaactacaagccaggaaaagaaacttcatcagacaccaaccctgcccgaaccttaatcttggactttcagtgtccagaactgtgggacaatagattttcgttatttaactacccagtctgcgacattcgattatggcagcccaagcagactaatacagccccatagaccattctttgcatagcatcctttcctatatttttaactgtgacaaacatatataacattaaatttactattttaaccatttttaagtgcacagttgtggctttaagtacattcacatgttgtgcaaccatcaccaccaaccatctccagaacatttttcttctcgcaaaactgaaactctgcactgcacccactaaacccttccccatttctgtctaccctcaggctctggcagccaccactgtactttctgtctctattaacttgactgttctaggttcctcatataagtgagtcatgaacagtatttgtgtctggcttatttcacttagtgtaatatcttttttttttttttttttgagatagggtctcactctgtcatccaagctggagtgcagtgctgtcatcacagcgcactgcagcttctacctcctgggctcaagcaatcctcccacctcagcctccagagtagctgagactacaggcgtgcgccaccaccacacccaactaattttttaaaattttttatagagatgaggtttctccatgttgcccaacctggtctcaaactcctaggctcaagtgattggcccaccttggcctcccaaagtgctgggattccaggctgccatacctggccctcacttagtgttatgtctttaaggttcattcctgtaacagcctgtgtcagaattcccttcctttttaagtttgaacaatattccattgtctggatactacattttgctttttatccattgatggaccattcccatatttttaaaataaaaaatgaatcatatacgattataatccccttactggaaactgtctccagtggtttcttgacacatttagaattaaatgcagactcctctcagtggcctgtgactttgcatgatccgtcctctgcatttctgtccttctccttggactctttccaccaaatacccccaggctctctccctcaattcattcaaatcccctcctgcggttgccgtccctcctcatctcccccaacacattgcctaatgctgccttgcttttctgcacagcccttactgctcctgcaataatattacacatgtgtttgcttggtgattttaaatgttttaatggaaaatgtctatgtttaaggtatacagtgtgatgtcttgatacacacatagataatggcctgattatcacagtcaagctaatgaacatatccgtctcttttcatagttacctttctgtgtatggtgagaactactctcttagcaaatttcaagtatacagtgcagtcttatgaactacagtctccttgctgtgcattactctagagcttgttcattctccatagctgaaactctatacgctttggccaacatctccgttattcatttgtttatgatccagctcatccactaagagtcgagctctgtgagggcagggaattttgcctggccttgactacttccccagcacctggtgcagggcctaccacatggtaggccctcattgggagttgagaggttgagctggcagatgaggaacctgaggcctggggaaggccacccagcaagccagacgcagagctggccttgaatctgggcttcctcctctttccattccctacaggctcggcactgcatgccctttaaaggttccagttctgtatccaccatttccacgtccgtctgtccatccacacttcctccttagcaaggccgcccatgttcctgcatccaggacatgaggggttaattaagatagtcatctggcttctcaggctaccatcctaagaacagccctcctcagttctggagctggcgggccatttggttcatctttgatttgttcttgccatggagagaggggaacctgccgctgggaaaggatggcgatggtttccagtgtgctctgctccattcagccaaggggctcctctgggagggcatgaagtgagcagtcaccagcgaaggcatctgggggctgcagacgcagctggcttccatggctgtgttcccctccagcccttgaggatccaggactttctggaaacatgattttggagttcactggatgctgaatccattaccaccaaattgtgtgaccttgggaagtccaagggagtcactccttcgagcctagcctccttttctgtaaaatgtgtgcaataatgccaataccacaggtttattaaagtaacgcacttaaaagtgtttagtgtagggcttgtgtcaaattaaggattcaacaaatgatgggtggttttgcttttatttggctttgctgtttatcagggctgagcttaaatctccctcattgcatcctaggcaaaccagggacctcccatgtcttgggaaacggctgagtgactgaaatcacccacgtgggccagaaaagagtgagagatgttttcaacatactctttgcctttcctttccctacccgggatgcgagtatcagtgacaaagagttttattctagggagatgagacaggagagctcacactgtattcattgagcaagctcttcatgtccagaacctttaaaatctcctgtacactcctgccccactcccagcccacactctcctacggatgaaaaaataagaaggggcagtaaaaccttgtctttgtatagagtccaccgggggctcaacagaggaggtggaggaggcctcagacctggatgtcgtggcagtcactgcaccctgggtcagagccccctgaggacaccaccctggaagggagaagctggctggaaccacaaagccccatggacaagcaagctctggcactacctttgagcatctgctgtgcctgctggcctgtctcacagggcacatgaggtaaaaagacatcaggcacaggctcccccatgttcattatatctggaaatttcagtctggccaagggagcttctgagagcctgaaggtggccagtatgtgactggaagtcaaggccacatggcacagtgaccagcgtgagactcctccaaatgtcctcagtgtaagggtggggaaactgaggccagagcaaggaacacccttgagtaagctaccctcaaaacggagcctcctctggctggtagctgggggcacagggatggagggtagcctggcccctcctggaagtggtggccacccagcagatggctcttcattgccacacagccgatgactcatagactaagcccaagcaagacccctcgcctcctcccttcatctctgcactctccccttcatggcctcacctctgggggagactcccaagtctctctctcttgccttggctcttttcttaagctccaggcctgcaggtgactccttggctggactgtgaacttgttggaagggcaggggctacattttagttatttaagaacgtgcagtctggcacggtggctcacgcctgtaatcccaacactttgggaggctgaggcaggtggatcccttgaggtcaggagctcgagaccattctgaccacagcgaaaccctgtctctactaaaaatacaaaattagctgggcatggtggcacatgcctgtaatcccagctacttgggaggctgaggcaggagaatcgcttgaaccagaatgtggaggttgcagtgagccacaatcacaccactgcactccggcctgggcaacaagagcaaaactccgtctcaaaaaaaaagaagaaagaaggaaagaaggaaagaaaaagaaagaaagaaagaaagaaagaaagaaagaaagaaagaaagaaagaaagaaagaaagaaagaaagaaaggaaagaaagaaagaaaggaaagaaaggaaagaaagaaagaaagaaagaatgtgcagcacccagcacaagacctggcatagagtaggggcctaacaaatggatggattgatggaggatgggaggaaggaccactagacccttccagttgaatgtctttctatagcccctactcaatccttgtaaaaccaaaggagacctctctctcctgattttactctttctctttacatgtcccagtctcgagccttgttctttccatctgtcactccctttccactctcagaaccgttcctgaaatctgaacctttctaacctctcacccgctttgctgcagcagcctgcagactgcgtttcttcccatttcttccctttctgactcctccacaccattccaaagagatggcccatctaacccattgacccagaagccctacttctagaaatctattctaagcaaatcatcacagctgtgcatacggacttttatttagaggtattcattatggtattattgcattatttataacagtgaaaaactggaggcaatctaagtgtcaatggaaaaaattgtgtattaaataaattttggttcatctgtctgatggaacaatattaaactgttgaaaaattattttaggaactaattaataacctagagaaatgctattgatatcgtatcaagtaggaagccaggagaaaaaaaactgtatgatgaatgcagttccagtctgtgggaatagatgtgtatggaaaagtaaaatagagaagaaatacactgaaacattagtttaggttttagcttggattaaaggtgagtttttaaagtttttgtttgtttgtttgtttgtttgtttgttttattgagacagagtctcactctgtcaccaggctggagtgcagtggcgcaatctcagctcactgcaacctctgcttcctgggttcaagtgattcttgtgcctcagcctcccaagaagctgggactacaggtgccggccaccacagccagctaatttttgtatttttagtagagacagggtttcacaatgttttccaggatggtctccatctcctgaccttgtgatccgcccgcctcagcctcccaaagtgctggcattactgttgtgagccaccgtgcccggcctaaagttcttcttgatgcttctctgcattttctgaattgtcttcaataagcatccatatttaatcagaaaccacaaacatatcattcactaaatacacatcttcaatcatacagttctcagtatgggaacgcatgaaagttctgctttcactggcatatcactggctgttcatgccatgtggcaatacaccccgaactaccagatttggcactcccagccctaaccccacagtctcagacctcagcccactccctagtcctgtgtccccgtgaccaaacccacacacgcattctcctccagccaaactggtccccacatgtttccaaaccagccttctgttctgtgctcctcagcctaactctcaaatggttcagaaacacaaattcgcatgtgcacagagagagacagagacagagagaaaatccaaatatgataaaatactgatcatcattggtgaacctagatgaaggggaggcatgcttacaatttgcattgtagttggatattttcaaaataaaaagctggggaaataaaggagcagtgtagtatagtatttaagggcataaattctgcatgaaattaccttatttcaagttccagtcccactgcctattagttgggaagtagtaacattaggcaaggtacttactttctaagactcagattcttcatcagtaaaatggggataatgaaaatcctggtgtatttgtttcctacagttgcccagagaatggaatgtatgtgtgtaaagggcttggcgaagagtgccacacacccttgatcatgaactgttagtatcagtgctaaatatagaaatcaatttattaaccgtgactctattcatgatattctctacctccataagctgctcatccctggacaactaagtaaagtgctacagctttggaaacttttcttgcacggttctttttctgccactagccctggaagctgctccaatgcggtgcctgccccgctggtatccatacctccaggccctggcacagagcctggcaagggggaagaagccattaaatgcactgaaccccaaatgagaatctcaaagggttcaagctgtactttaaagaaaactcttctcatcaggaccaagtttgcacttttgctgatgcagccactctattcccatgggcttccttgagataaggcatcaccttgataaattagctgtagatataggcgtcttgcagttggcatgggaaagcaatttaatttccaattaagcctgatttctgggccaggaggttggcctacctcgcactggaaggattattctggccaggcctattattatcacgggtcatgattctcccatgaagtggactctcaaggaagctggtccttcaaccattggaatggttcagtgaggcagaaatacggcctctgtgggtaggaccctttttccccaggaattaagtttatacaagtagagtcagggaagttcaaagcaaagataggcagtctgtttgtggccaaaattgttaagtcagggtacccctagaaatgaagcaagaggggagagagagagggaggtgaggcagtcatcaatcaggcccacaagcaagagaggcgggaagttgctagtaagaaaaagacggcaggaggtagttctctgagcccaaatcgaaaagaatctgaattatcggttgaaggagacacacttacttgaagagagaacagacatttgtgaagcatcttttatgcaccgtgctgagtacttcacattcatgattgatgatacaatgcaccctgtaaaacaaacactgtgaggctcactttccaattgaggaaactgagattcaggaagattaaataaactgcccaaagtcatgaacaaggcagattcaaactcttgttttcctgagcttttctccctgcaggctccctctcaaagacaaatacaaaaacatcatttagggccataaggataatgccatactcagctgtatcttacccaccaaaattgtaagcatgagaaaaaggcctttcaaacaagtcctgagagagtgaaaataaatggtggctgaggctgcttggggcgaatgatctgatggaagagctaacaatatctacttctcttttgggtgttgtttttgctcccatctgtccctcaaggagggagacctgagacctgggcgcaatggcccagcatggctgagaggctcctgtgaggtcaggatctcctcccacagctcagactgcttcaaaccagcggggttctggcttgtggctgaggggatttcaattcagaagggttggaaagaaacaacagaggggaatgagggatcatgaccagtggagccacagaaaatttagttaggtgccaagaaggtatgacatggcctaagtttagttaacgatagtaaaagaggactctgaggcaatatgtaagcaagcatgctgtcaactcctggacaaattctagagcgcatgattaaacccatggtttgggaacacttgtgaaagaaagtagagatgaatgagaggcgggtgcatttgctgagaaggagctgtgccggtgtaccagtctcccttctgttctgcttttgcatagtgaccagttcaaggatcgctgcaaccatggtgtgcctgggttccagttgggcgtgtgatgagctatgggctggaaagcatagatttaggcaggtgccagctggcctcgtggtcctgtctgtcttggcagtgcccacagcagaacctttgtgggacattttcagatccttctgcttggccatcacccccacatctattgagacttcagaggtgtggccccagggagtcaattgagagcctgggctctgtgatggaaaggtatctggaagcatctaacaagctctcaatagttgaccttgacctgcttggcattttccacttttgatatggggtaaagacaagaacaggattcccagtggttagagtgttttctggagcaataccacctagatttgaattccagctctgctatttgctaacttctgccttggggcaagttaaatcttttccttgtgcctccattggctcattggtgaaatggagatactaataataacctcaaaggatgttgttactgttcaatgagctgtgcctggaaagatcctggcattcaggtaggtgttcaacaaatgctagcccttattaccgttaggaatgatagattcttgcacagcaagtgatcagctaaatatatgcccaaatgaaagtggctccatcttgctatagtgagttattcatccaaagaggtgttgctgcaggttgtcattgaagagaactattgtagaaagagtgtgactgtgttctccccgacaatacttctgacaccacgtaagagggttttcttcccccctactgataccaactagtttggacaccaactgggtgtcctacaatttaattcaattctgacactaactacccagagttagctcagaccccacaggttaagaactcagtcccacaagactgcccccattcaaatgccagccaccaatagggtgtcctgactatccacacttccacctgactgacagaacattcctacaacctcccctacacctccagataggatataataatttactagagtgatccacagaactcaaaagaacattttacttactattgacacttactattacatgttgattacagaggatataactcagaaacaggcagacggaagagacacacagggcaaggtatgagggatgcagggtggaggtgcagagtttccgggccctctcccagcaccttgacgtgttcaccaacccagaagccccccaaaccctattatttagggggttttatgaagatttcactacataggcatgattgttaaaccactggccattggtgattaaactcaacctccagcccctcttccctctgcagaggttgccgggtagagctgaaggttctaactctctaatcatggcttggtccttctggcaagcagctcccatgccgaagctatttacaggcccaccaagagttatctcactggaaaaaagacactcctatcgcccctaaaggacctctgtaccaaagaccaaatatctttctgtgagacaacagagagttcaagcaccaaatataaagtggagaagcactagatgatctctaaagtcttactggcacttggagaacaagtgtttgtatttgaacatgcggaatcaaaggggagttgagtaaaaggggctccagaattgacacaggaggaggactcagtgcagcaatctcatggggcgtggggacagaagacacatcccaaagcttcatgtgcctctcaagcccctgcttttgttttatgtgtactggggataggggaggttggtatggaatgatggagattatgggagaacagagtccatctaagccacttttgactctgcaactgggggagatgcagctggcctgggaaggaatcacaaacgtggtccagtactcagtttagagttgttggctttgcttccatatacctccctttctcatctcccaaatcctttgaggaagttggctggtgaaaatgtacttatgtaagtggggagggagagttgtgcaaagctaggaagaagctgagttctgcatcagaggtgacatgagaaagaaccaggaaagcactgtggagaggaggatgacccatcaactgactcatctgggggacaggatctgggagccagaggtgatggagaaaactaaagccctcctcctggcccccagtgggaatctgatggagcctggtggagagcctcacatttctacagggcacggtgtgggaggggcctggaggccttgtctctggatgcactaggctggcagttctgaagcttttcatcatcaggacccttttacatgcttaaaaaatattaaggatcctaagagctttggtgtatatgggttatatctattaacagttaccattttagagattagaactaagaatggtaaaaatatttaatttgaatttacttattttaaaataataatacatccattagttgctaacaaaaataacatatttttttgaaaaacaattatgcgtggcaaaaagtatattgggagaagtggtattgttttacatttttcacaaatctctaatgtccagctttagaaaggcacctagaatctcattgctacctcggcattcagactgttttaacaatgcatgttacatgacctctggaacattccattgcactctcataagagaatgaaaatgaaaaaggcaaataatgtcttagtattattatgaacagagttttgactttgcaagcctccactttgagaactgctacactggactgtagtgaatttctccatgtctctctgatctttctttggtcattttctttcccttccatgtgacagggcaatggctggtgaggtacaggaaggtggcactttgctcaaacagtgtcttcttaaatatttcatagaattcaaactcccccaaacacaagaccaattcaaagaatactggatattctcacataacagcctgtgctgccaatgaacaataaaataaatgcagtttgcaatgccctgacccaaggagtttaagataaattttggatgagttgttgatttagaggaggagctggtatcacttcagtaagtcacagaaaataagattatattaatatttatattgcattattttaaatctgcataatgctgagtcttcactgtgaagaaggaagcccctcacaatgattagtgaggggtagggagggagaatggcaagaagacaccaagttccttgcaggcaagcaaatagatacatcataaaagtgaagtgaaattccagtcctctgagatcttcataaatagaagaaaccctcatttctttcctcctctggttgcagcttggactgatgagctgaagctctgtctgagacctggcactgttaggatgtcccccagggttctttccaccccagttctggagctcaggtggccccttgcctctgaattccaccgctttgtctgagttctggaggacggcacatgggagaaccatccaggtgcacctctccaggtatgagtcactagtccatgagaggacaataataaatgatggaagcactagacactcattagcagagtggtttattaagaactgatgaaggttctctgctcccaggcagatattattgcaaaaaaacacgtaggcacagggtctaactccatcatgcctaaattcccattatttcatgcttatcccgtgcataaagttctgtgagcagcagacagttgtggcatttgctagaaggccagtctttattgacaggaggagaacatctatctcaagcaaatgaaggtcatcattaataatttatgggacagtgggggttaggcatcctcacatactaatttttctagaggaacatggccttttcccctgcagggattgtttgggtattctgagtttctgtgtattttagtcccaaattcaggtgcatggaaaccattgacaaaatagaccctttaaatcagactccaagttgggacttcctttcttatttttcttccttttttaacttaaatttttgagataattgtagattcacatgaagctttacgaaataatacagagacattccgtgccccctctacctaatgtccccaatggtaatatttaatattttgcaaaactatagtacaatattacaattaagactttcttaaaagactcacatgaggacctttgagacttccctgaccccagaaggaaaaaattccagggaatgatgagctgcctgcctttggaaggaaggtccaccaggtaagaaactggaggccacagggatacctctgggctccctggctggaattggcagatgctggtgcagatgccagggcctcccctcagaactccaacctgcatgagggcacctgggttccagggatgcaacgcagctccctgcctggcccctgtggctttgagtggctgtgtccctcagcccttcacagctggctctgcccctcagcccttcacagctggctctgcccctcagcccttcacagctggctctgtccctcagcccttcacagctggctctgctgagttctgtggttgagatgccaggtactggaacacacagctccaggcttgagtcctagcccctcactttacagatggccttggccagttacctcttacagcctcagtttttcatagtaacttagatagcacttaccatatgtcactatcctaggaaatttacataaaaatttgtttcatgccaaaactctatggaaagatactattatcagtttcgttttgcaaacgaggaaacaggcacagaaaggttattcgtccaaagtcacccagcttgtgaacagcacagctggaatttgaacccaaacagtgcacatcccaagtccacatacttagccactgtcctctgttgcttctcatcatctgtgaggcaggttcaggagtatctcatttttttttccaaggcaaactaattagtacagtgcctggcacagaataaataagcacccatacatgccagataacattgtcagtataacttctggaagtttctgagtattcatgacttattcttttttttttttttttttttttttttttgagacagagtcttgctctgttacccaggctggagtgccgtggcgcgatctcggctcactgcaagctccgcctcccgggttcacgccattcttctgcctcagcctcctgagcagctgggactacaggcggctaccaccacgcccggctatgattttttctattttttagtagagacagggtttcaccgtgttagccaggatggtctcgatctcctgacctcgtgatctgcccacctcggcctcccaaagtgctgggattacaggtgtgagccaccacgcccggccgactttttcttgttactaacaatagctctttttccctgatcctctccctcctcctacctcccgccctccaataggcctcagtgtgtgttgttcccctctttgtgtccatgtgttttcatcatttagctcccacttataagtgagaatatacagtatttagttttgtgtccctgtgttagtttgctaaggataatatttggcctccagctccatccatgtccctgcaaaggacatgatctccttcctttttatggctgcataatattccatgacgtatacgtaccacattttctttaataatgggtactagacttaatacctgggtgatgaaataatctgcacaacaaactcccttgacacaagtgtacctatgtaacaaacctgaacgtgtaccctgcaacttaaaatgaaagttaagaaaaaaacacacacacaaaacaaacaaaaaaaactatagttgccattttaaacacctatgatgtgtcaaacattccttcagccctcccaactatccagaaagagtccttcttttatagatgaaaaaactaagaatcaaagagatgaaatcgggcagagtagagacaggattcaaacccaagatctgcatcttggactcacaacactggaagaaacttcagacaccagcctaacttcacacccagctcaggactggccctgccgaatggtcactcacctgctctgaaaatcctcgcgacaggacgctcacttcctacaccggtagttctctggctcgaggtgtgccacagaatcccctacgcattgttagaacacagaacattgctacccccaccccgtgcagggcttctggcgtggtggggctgggacaggggcctgagagtgtgcatttctcacaagctgccacaggatcctgatgctgctggcccagggaccacacttggacagtcatcgttctaggaaaacttcctggagtgggaatggtaaaggtgatggcttcttcccattttgcccttttcaaatctgagataggcttccccagcaggctcagtgccagagtccataccctcaatttaaataacaaatcctcctctatatcatgacctttcctccagagggttgtttttcattttttgttttttgttttttttttgagacggagtcttgttctatcaccaggctggagtgcagtggcacaatctcggctcactgcaagctccgaaccccgggttcacgccattctcctgcctcagcctcctgagtagctgggaccacaggtgcccaccaccacgcctggctaattttttgtatttttagtagagacggggtttcaccatgttagccaggatggtcttgatctcctgacctcgtgatccaccagcctcggcctcccaaagtgctgggattacaggagtgagccaccgcgcccggcccagaggggtttttaagattgtgtgttctgaatggcctgtctctgactggaacccaactccgtccccagacccacttccatctttttctgtgagggggacacactctttcaacttttccaaaatggcatctaccatggcttttctgattaaaagcaaacgaaacacacccttcctataatcaaaaatttagaaaagcagcaaaaataaaaaggggataaggaagaaaacagaaattaaccaccatcccaccgctaaaattttgatgagttctcatgtgtttccttgcagctgattgttgtttggcatacatttattaatattggaattaaaaatatatatggcactttatatcctagaaaatagtaatactgtaaatgtgttctagaaatgggagctgctgttgctcttattagagaattcaaacaaagaagggaggctcgctggggacagcttctgggggaggatgggtaccgctttgagacaacagggagaactcaggcacagaggtgacgatcatcgttctctgtggggcacatagtgatgcagccggaaacaggtatgagtcagttgagtggggacaggtaatagagagctagaactggctggccttatggcctccaaggcattggggagccactgtacattcttgagcaggcaatgacttcacaaaaggatttctcaaaggttagtcctgcaacagaagacagcgtggattggactggaagagtgggagggcaggtggagaaggcattgtgctgcaagtggggagcagccctgggggcccagccagtcccctgtgccctgacaagtggtatggcatggatggatggctctacttctgggccgccaggatggacaggtactggttgctcttcaccatggcgataatgaggaggccaccggtcagcaggaaggtgggccagaagagggagaagaggagggcctggggcccgtagaggcgctggaataggacgctggtttcgttcccccgaggtgcggagaagcagtagaagacctgctgctcttggaatttggctctgaccttctccacgtcggcccgggccgtctggtaattgtccacgctgcctgggatgtaggagcactgtggggagaaacaagagcagctgtgggcttggaaatccccatttcttagccaagggcttgatatggagtaaagaaaaataccagctttgtagtcgggcccctggattggagtcggggctttggtctaaagcttggcaggccatgcgctgtacaggtctggagagcacgctctcatttgtgtcttgtgtgtggatggcggtgctggagctgctcggggtacaggctacacacctgggcgcaggtcctaccttggagtcctggctctgcttggattggctgtagaatttttggcaaatttctcactctttctgagccctgaagcttcatcacttaaatgggtgaatatcggtttcaaaggatattatgaaagaaggacttcacacagagctatctaaggaaaccagggagggacacaggccaagtgggctgtgtatttgaaatcgagatcatgtgctcaattgcctacagggctcatgaaggtattgtcagagggtgaagcaggcaaagcaatgagatgacaggtgcccactgactcttgccttggtgccaggaagaattgccagggtgtggcagggcctgtcaatagggagagagccagctgcctccagacaggcagtcaccactccctccaggcaatggatgtcaggccatccagaagatctataatagccagacctccaacactttaagagaagttagaaaccagatcacacctgtaatcctaacactttgggaagccgaaggggaaggatcccttgagcccaggagttcgagactagcctaggcaacatagcaagactttatctctacaaaaaaagttaaaaattatccaggtgggcatggtggtgtacctgtagtcccagctacacaggagactgaggtgggaggatcacctgagcccaggagttggaggctgcagtgagctatgatctcgcaactacactccaggtaaggcaacaaagcgagatcccatttcaaaaaaaaaaaaaaagtaaaatattagctaaatttaaaattgaaaacctttgcagtttcaacctgtgtacagcaaacaaactatgttggcaagcgggtatttgacactgggatccaaaggaaagaaagaatgcattgaaaagagttttgtgccagcagagcatgacacacatttaattctgacgttgattattgttattaggaactttctgccctgttcagatgaggccagctggaaagtgatgcaaagcagtcataaagcggagttttatctggttttatctctgttctgagctgcaagtgtggtgcccccatctgcagcagaatacctacagggcccccatagcccaggtccctacccactctgcatcactgagggcgagacccaggaatgtgtgattccttcatgcacttaattttgccctagtgaaatcatgtgcaagatcaaaatgtgtaaaactgagacccaaatggcaggtgttgagccagattccttgcaggcctcggccactccctggatttatatgaggtgccaccctggaagctgcctgccctgagggcattcactccagcaacacagaggagggttgcactgtagttctcacagcctgggaaatgcagatgctgcactcagatctagggccccagccagccagggagtagctgaggctggggagacgctggctcctcaggaatctggcattcagagctgttggacactgccaggtcctcagtagcatataatccagcatcctgagctgacggtgagggggcctggcctgagtctctccaatgcctctgactgtgaccttggctaacctagctccttaaatagcagtgtggctatggagtcagacaggcctgagttctgagctgtgtgaccttggcaactgccacaacctcactgggccttgtaaaatgggtttgtgaggctacctgcctaggagaactgtcatggggattaaatgagatgatgcatgtaaagcactgagcacagaagcccagcacacgataagaactcaaaaaagtggaagatgctattattaataataatatgttttgacttatctatgaaattgcaacaacagctccttctttaccttcttaaaaagaggtctatggatgagctctgaagtagaggcttctgtccatcctgggcctagtgtatcctctgcctgctcagggttcctctggatcttttatgctgggcctgtttggcaagacactgggcaggaattcactcttcatggccaaacccagaagccggggcctgaatgcatcctttctctcctgtcctgggtccagctaagcctgagttatctgaatgatctgaaaccaaccagctttttcccaagccctgcagtgtaaggtccccaggacagacaatgggagggaatttagaactcacctgctccaggctaagactcacaggaaaagctgagggcagactatggcccctaccttcagagttggagggtgggatgagagtcttcttggcccttcacagtgattccagaggacacccagctagcctggagccccagccacttgaacccctatgatggacataggcggaaggagcagctagcccacaacccagctgcttggcaaaaacacgaagggcatttccactgcttcctcccagctcctgcagcctgctatcagcaccacacctggtcaagcctgggcggcaggggagaggacagcagtggctccagcatgtccttccttcacatcctgctgacagttcattcaggggatgctcctctgagctggcaatctcaggaccagggaggcagcctgaaaaccagcctgctctggcccatatcactcccggagaatgttaccagttattgaaaatttgtttcttgcattgggataaatcaagggctactgaatgccaacgcagaggcaggggtcatgggtaggagctgcctccagtgggccctgagacctctctccaccgggtggggccgagtcatactagcgatgacagaacacctgaccatcctgcactgcccagacccacttctcattgaccttcagcactctcaagatcccccagcctccacgccccatcccaggcaccctgccccttcccgtcccatcagccatcaagtccggactgtcagcatctcccctgctgcaggccacatcttggtcgtgagtgcttgctgcggccttggctcctctgtctagtaactggacccacacacctgtaggctccatcttcccagcccaactctgaaactctgatcatgccctaaagattcccattgccaacagcaataatttccaaccttagaatcaccttgggagctccatgaatggatctctgaccagagattccaccttgatatgtctagtgttggaccctagttttgttttttaagactcttacagggttctaatgcatagccaaagttgacatatcttgagacatacacactcacattttaattccatattgtggtgatcaaaggcctctgggaacagaccttagtctgccctgacagccttttccagctgcatacaccccatcatgggtcattttctgtagtcagccctctgatccctgtctccacctagcccttccctccgccatgcctcgtcctataggcatacccgcttcctatatcacctcattctctatgccttgcatcctgcgcctgcctgatgttaaaagcctaatccaagagcctttcttttttttttttttttttttgagatggagtttcactcttgttgccaggctggagtgcaatggtgcaatctcaccaagagcctttctgatacccccatcattgtcagctggaaaacatccccctcctctaacccctgtaacttcctctgttcttctccccggtgccaattcttccctgctaggcactgttcatgcatgagctctctcctcttgagtcctacaggcttgacacaggaggtgctcaatggctgttgaataaataaatgagaggaggaaagaaggaaacaaggaaggaaggaaggaaggaaggaagggagggagagagggagggaaggagggaggggaaaaaaaagaaaagaaagaaggagggaagaaagggaaaaaagaaggaaagaaagaaggaaggaagagagacagaatatgggccaactgatcgctttaggaaaggatatggtggtgagttttgtgttttggagggggagggtgggatgttgggatgcaaggatggaaaaaccatctaaatgtttgtttatggaggttactccagccctgagtccctggtttcctggggagtcaccgggattccactttgaggatctggccctgggcctggtccctcatttgactgaggttgtagaatgaaagtactaacactaatcactgcttttgtttgagtgcccactatccactcagcatcaagcgtggcactttatatacagcgtctctgacttgataacagctcttcaaggtgcagcattagcattccactttacaagggtggaaactgaggaggtgagaggctaagtggcctgcctatgtttacacagccagttagcggcagattcaaacccaggtctgtgtgactccaacacagaagagctagggctggctcagtctcattccagctgtgagacctggtcaagtgggttgatctttctcagcctcggggacagggacagttaggaacaggctcacacacctgacagggataaagggatgtgtccccatccctccagttcagtacctgctggttctggtcccgagtgtcctccgtgtggtacagcacagcccacctgccggcagctgacacgttgacccacaggcatgggtactggggcaccttcttgcccttcagctcctcctggtccctgatgttggtctcaatcaggtggcacttggattcctgggtccacacgctgaggagaccacacacatgcacacatacacatctcagaactgggtgacacacagaacacccatttgaacccattatcccctgggagcctctagagggatccaggactgggatcctcatcttgtcttcagcatccagcaataaaggcacatgaccccacagtccccggacacagggaggaattgtagaagctggatggggtcttagacattatctatatgactggttctcaaccttggctactcttgcaacaacctggggagcttctaaaaagattcccgtgtccaagctacaccccagagcaagtgaatcagaacttcttgggtggtttggcccaggccctgggtgttttttcaaagctccctgatgtgattctgacgagcagccaaacctgagactttcttatccatatcgtcttcattttgcagaggcagaagagaaactcagaaaggtcaagtgactttgctgagaccttgcaggacctgaagctaggtctgagtgggttggagagctgtgttctttcccctaaaaggagcagatgtagaaggggtttgagttgagccaggatgggaaagatggtggggacagtctctagatggtgcttcaccagattaagagtccagcctggaatcgcttcagcgttgtgaagagtgaggctgcagcaggcccgggagaggctaacaggttcatcaacatattagtaaatcagttgtgcttcaactcccaagtatcctgtgggagacccattgccagtcagaagggggctgtcagctgctggaacgtgcccagagcacaggtctgagacttatcctaaggacaggctgggggaactgagtgtctttgttccaaatagaacacgaattaggaattcacagcttttccttaaaatctcaagtggttgatatgtcatggagcaagggcatggaccattctctgagattcctgagcagaacttcagggaagcagatgctggctcaatgcagacacatcagaaaacctcaaacatgaaatgtatgttcagtgaggcaaggagctccccgtctcttgaggtattcatcaggaggctggatgcccacctgacagggaggcttcagaggggagagaattatgcagctgagctgtaaacatctgcaattctctgattcctcctgggatcaaacttgcactggaacctttgctctgattctttgctatttcttctgagaagggcatcatgtgtctgttaccaccacgtcctagatcatgtgtctgttaccaccaggtcctagaatctcagaccagtggggctcagttcatcctaccttccctgcacttgaaccctagaacctaagaatgagcatcgtcttgaccctgctgccttgaatgagggtcaaggagaggggtgagtagaaggccagggttccttacagatgccagacccttaggagagggttggggggtgggcaggccgggagagctcagtaccttttctggtagaggggcagcacagtcgtgaccaggatgtagtaggtgatgacggcacacaccaccatggttacacccaggcaaagggctcgtgtctctccccgcttctgggccatcaccagcttcttcaccatattcactgggggcagtgatcatttctaggtccacagaagcaaacagaagtgagatcagcccagttcacaggtgatccacagaaagagaggacaggtgagaggggaaggtactcaactattaatatcactcttgtttatatttggagctttgcaacttccagaagtcttgctttttggaccccatgtaagccttccctgtgcaattgagaggcaattgcagataaaagacctacggctcagagaggtaaagtgacttgccctaggtcacacagtatgtaataggctcagtaatggccccccaagatgtctatgttctagtctctggaagctatcaatgttactttatgtggcaatgactttgcagaaatgattaagataaaggctcttgaaggccaggtgcggtggctcatgcctgaaatcccagcactttcggagaccgaggtgggcggatcatgaggtcaggagatcaagaccatcctggctaacatggtgaaaccccatctctactaaaaaaaaaaaatacaaaaaattagccgggtgtggtcgtgggagccagtagtcccagctacaggggaggctgaggcaggagaatggcatgaacccaggaggcggagcttgcagtgagcagagatgcgccactgcactccagcctgggcaacaaagcaagactccgtcaaaaaaaaaaacaaaaaacaaaaaaagataaaggctcttgaaatggggagacaatattggattatccatgtagctcctaaatgtaatcccaagggtcctaataagagggaagtgaagggagattaaacagatgagaaagctaaggtgatatgaccagggagacagcaattagagtgatgtgaccacaggccaaggagtgcgtcagaagctggcgggggcaaggaacaatggctcatcccccacggccactgcagggagtgcagcctgcagacaccttggtgattttggacttctggtgaaatttctgtcgtttgaggccgtcaggtttatgatcatttgctacaacagtcataggtcccatgcggtgagcgagcagtacatgtgcatcatccatgcacctccttccacggcacttatctcacagggatacttggagtatttctgcccagaaacagttctgtggcagggctagctgggccgggcacaggcagggaaaggagaggagggccccagaaggcagctgcaggttgtcaggagaggcaggaggtttaccatattccggtgttttttttttttgtaaggaacattcccctacttcaagcaaagaaagaagaaagaaggcatcatggtggcctcagcgactgctttcttatttcagggcttgaagccacctgggacaaagcagaatgggcacattctgctggtggttgctttccttctctcctctttctttaggcagcaactccttgtttttcccctggacattgactccaccccaatgcaagcaaagattccaccctcccctgctaggctcctgatcgctcccccaggagtgtgagtcttgacaaagacttcaagaaacagcccctcaatctatgccgcctggagccacagagatgcccagccatggtccccgcgtgatttcccatggttccgcaagctgtcctagagcctctggtaaatttatttgctgttgtttttatttgtttaaagtaaccagagtccatttctaccaaaaataccaggaagctatcaatgtaatcctccattttaggggaaattttaggggaatttaggggaaattttagccagatatcagggggactttattctccttgccaggtccctaaagtaataaacatattatggtttttgtttgtttaattagccagtgtccgggtgacaggccttagtccaaagagattttctgcaaagtgctctattttctgctcaggcgtctcttaactactagactgtttcaaatattcagagattcttgactccctccccttagccaggctgccctcatacccgggcatctccgctaaagggaagagaccagggtcaggcaccacggatacccatcacaccttcccagtgagctggtccacctcccctatcgatcggcagaggtgacatccaatgacaactttttctcctttatttggcaccaggaggtgagtttctcctgcattctaatggagacattataaaagcacaagcaagcagaaattgcccccgacaaagagagatgttttattcaactctttttattcaatccttttcctcctgttctgtgatcttgtgggaatgggagagcccatgcctttttctacctggcgtcagttgaacaagactctccatgtattcacaggtaaagcaacagaatcacctggaggtaagctaaaagccccaacagcctgcttccccaggacctgcaagggtcactggcacttggccccaccccagatactgtgagacataaatcatttgaagccaatgggaaatcccatcttggaagcctagggctgagtgcccacaacaaagccatttctctcctgggggaactggatcgcacctgtgggggcttcctgtggctccttcctggctaatcagccccccccagcgcccagggccatggcctcctctgctatttggcttctagtgccctctcaggcccctgggcactcctgaggctggtgaaggcaggaacctggttttaccagttttaggagctcagaaggaaaggaaaggagaggcttccctgtcacagagaagtctggaaacttggcttattcaggtctgacccgtctctaatggtctgatgagattgttgcctgcactgagtgagtttatagagtcatgataaatcctcctaagaccatgcgtggggttcagtgtagatatgacttcagcaagaagttagtattcagcatccaaagggagaacctttggcgggaggaaggatgggaactgtcaatatcccccaagggacagaaagaaaaggaagaagtgggtttcagctatcataggagggatttcagttagactgtaagaagaacttcccagttttgagcatttctaaatatctctgaagttccaggatatatcttcccatttagaaaggtcacttgagatctgggatagattcagagaagatggagaaggacaaaggaaggcaggactttggagtgtcctgggtgacctgatagctgggtcgacatccttttccttagaaggacaaggaatagagtacattgttgaacagtttggtggggtgtggacagggcgattctgaggtcctcagacatggaatcaaatcctggctctgccacttacacttagcaaccacatgactgtgaaacgagaaccatggtacctgcctcagagagttcagctaaagatcaaatgccatattgagtatcagacatgtatcatagcacctagccccaaatcagcccccagtaaatattagctattactactaacgaaggaaaccctgaaagtttggagcagaagtctggacccctcttgatgaatctatttttgtcccacctctctaccggtgacaagtgccagcattggtgttaatctccaggctgcagccttctggccactctgagaactgggacctagagggccagggcgcttactaccagagtaacctggccactgtgccaccctccccactggccaccagaccacgggccctccatccagaaggacagccccgagaggaagggagtcctcctgcctgcctccctccctgccccgtggcaggctgctttcccctgtctccctccagcccggtcttcagagaaatcacttcccaagtgctttcaggcccggtactcacagtcttcccggcgtcctgtgggtcttgagcagcagacagtttctttctgcctggacccccgcccccaccccaaaagaggccacagagcttcagcaggaagtttggcctccccgcccgtctccagggaagcagcttttggtccccatctggggcaagcctccatgcccaaacatggtcaagtctgagcacacagcctggagacacagactcggagagcaggtacccagccctgaggaaggcagctgttacccaagccctgcacctccatcttcccagagtctcgtgggaaacagatttcaaacaacaacagacagcaagactgagaaactacgaaagatcagcctggtatatttggaaatatttcttcttctctctgtctctgtgggctggcaaagatgccagaaataggaaatgattctccttttgttggcatgaggaagggtggagttgggctggaggggttgggcttgtcactagtccctggcatatccacgctggagcagctacagctccctgcctttggcacttacgtgctgtgtgaccctgagcaagttatggcacctctctgggcctcagtttccttttttgtttttggttttactcccaaacttatcgttaaatgacctcagttttctcacttgtgttactggcatttttaaaacctactttgctttagggtagtgatgggagttagagacggtggggatttatggcaaggggagagaactgactttttaaggaccaactgagctgaagctgggagtagtgagagctccacaactgcttccaaccaggtccagggacagtctgctcaccaggggccctcccagagaccgcgaaagtacagagatttcttcctagcaataagacaagtgaatgtcagcatttgcaggcaaaaaacatgcttttagatctctgcttcttcatctgtaaagtggaagtaaggattaaaaatcagcaacaaagggcaggcacagtggcccacgcccataatcccagcactttgggatgccaaggtagatggattgctcaagcccaggagtttgagaccatcctgggcaacatggcgaaaccccatctctactaaaaatacaaaaattagtcgggcatagtggtgcatgcctgtggtcccagctacttgggaggctgaggcaggagaatcgcttgaacctgggaggcggaggttgcagtgagtcaagattgtgccactgcactctagcctgaacagagcgagaccccgtctcaaaaaaaaaaaacaaatatatatatatatatatatattttcaacaaaacaacaaaaacaatcccagatattggggctttcctaagtatcaggcgtggtggtagaaggcagcttatctccacccttcacttgacccaagaatcaaagaacctgaaactgagacttggaggcttgaagtcactggtgcaaccctaggggccagaactagattcgaagctggcccttccagatggcacagcttggtctgtctctgatgaccctggggctgctctgagacattaaaaatcacctcgatcatacagtaagctgccacctgaggctctggaggtcaccctgagtttccccagcccccagggaggtgggtgcagcctggccttccctgctgagcgagctcaccaccttcctccctcctgcctccagcaggcgcgaaatgaaggcagccactcaggcctccctgacacactctcaggcggtgagtgcccttctccacccctttcctaattgaatcttattaacaggagactacagtgtctgtttaatgggcaccatagcaccagagggtctaagaccagcttcagaccttgcaggcagattgacagagggatgtaggatctggaattcaatctcagaagagcaattttccaaggatgatcctctgtccactcagaagcaggaaaagtcctcctggggctaatccagaaatgccaggcccccctcctgcttccctgggggagagatacacagtgcaacaggctgccatttatgagtataaccgaagggctccttgctcgtgatactctgaataagttattaagggctacatattatttggaaatcataaacaaactttagcattcttcccaagggaaggtgggaacaaacagggaaggggggccgtggggtcttctgctccccctaaatgagccacaaccaaaaggcattgacaagccctgtcctcgagggtttgtgggtgaaaacccaggtcctttgctggctgcggggttgtgtgtgacagatggctacaggtggagggcaagaaaataacaatgctgcaacaataaatattgacggtttgcattagtacggggtgtcagagatcacaaaatatcttctctgactcttccaacagcttcttaaggtactagcacaataggctcacaatagaccactgaggtggagatttttctacccatttgatagagggagtaactgagcctcagagaggtgaaataaattgcccaagcaagttactttgcctctctaagcttcagtttgtctgtctctaaaatagagataattatacctagcccctcagtgtttttgaggaatgagagatcacctaagctacctgacacatagtatggagattgtcctttccaaagatggtcacaccaaatacttcccattccatgtgcccttttcacagtgtggcatcaacactccaccatcaagaggggcattgatgtctcttccccttcaccctgggtggagcttcgtaagggcctcaatagtagaatatggtagaaggacacagcacgatgttcaaggctaagtcatagacgggggctcgagttccccccacacgctctcgggacatgtacctgggaaccagccaccatgttgtaggaagccgaggccccgtgctccagctgacagcctcagctcagatctcagccaacagctagcaaatctcaccgggcatgggagagaacaagcctgcagacagttccagcccccagcctgccagcctcccagctgaggcctcagagaatgtggagcagagacagcccacctgctctgtgctctctctgaattccagagccacaaaatccacgagaagaaaaaaactaatgtttcatgcccctgcgttttggggtaatttgttatgcagtcatagtaactggaacacacttgcaagtgatttcaaagggggactgttacagttgctggtgatagtggtaggattaaaccagtgagaattaaaacacctgagattgctatatggagtgttacaggagagtttagaaatgctttatctaggtagggcatggtggctcatgcctgtaatcctagcacttttcgagaccaaggcaggcggttcatttgaggccagtagttcgagaccagcctggccaacatggcgaaaccccgtttctactaaaaatacaaaaattagctgggcacgatggcaggtgcctataatcccagctattctgggaagccgaggcatgaaaatcacttgaatccaggaggcggaggtcgcagtgagctgagattgagccactgtactccagcctgggcgacagagtgagactccatctaaaccaaaacaaacaaacaaaaaaagtgctttatctactcttaggtcacacactatggcacaaatggaatagaagggcagtgatatgggagggtatttttgtttatgaagcacctactatgtaccagggaatgaccacatagatatgcaatacatacacatacacatacacatggacattcctctccacaatcccccacaaaaggccttgttctttctgtaaaagcacaaggcaaagtgattttcccaaggtcacgcccctagcgtgtgatgtgatggagcctggagtgcacctgtgcccgctgactccacagcccgtccctgcccctctgtcaccccatgactcccttgggagcagttttcaagagaccccaggtttcttcatgatgtctgcttccactgctttccagacaccctcagctcagtctgtacccctctctggattatgcacctgcttgtttatttaagtctttctgaatcaatatctcctctctgctgacacttgggataataagtcccataaatcaaattggcaactgagtcttgagcccctgtgtgtgcctctctgagtgctgcagggatgggtgttagtcactctcagtcctagcgaagctgtgcgttcacagacatcccagcacttgctatgcagaggctctggatacaccactgtgccgaggtgactcagacacggtcccttcactgcagaaaagcgatgccagatttcctcaactacaaaaatacagaacagaaagtgaaagatgtgttttaaatgagagacagtaataaaaggcagaggaaataacggtgggaggttttttagtagagttgagatgacaaagtataacaacagcaaaagtaaatgccgatattacaattaaatggtcacacaacaagacacgacaaaaaacatggtaaagttgttccctgctgtgtagggtgatactcactcctttttcctctgactcttttcaccatattttcccttggcctgatttttcttcctttatcctgccatgctgttaacataattgtaagcaccttgaaaatcctctttgagacaaagaggagcataaataaataaacagccctgctgtctgtctgtgtggtaaggttggtttttttaaaaaaatgctttttccttagtgcaaatcatcccagctctgtgggaaagtggcatgatgtggaagtgcagggagaagatgaggtacagtgttagcctcactgctcagagagagttgctgtaagagtggtggtggccttttcaacacacataaaggaagcatgtgccctctccttccatggcacatgtctcctctgtccttgcctcctggccagctcttcctcttccacaggactccccgctggggccttccctcgcccccagccccttagccactctccgcgcctcctgggccaggcggaagctctgcttccgcatgctgggagcaccgcatgcctcttctgcagaacacttcctccgcctgtaatttaacatttattcatgtgcatcctccattaacatgtctcctaacccaagggtaagctctctaaaatcagggactggaaccgttcttattcactgccgcatctctagcgccaggaggaataaacaaagatcttgcggttttgttgtcatcgtgctttggttttcgggaaaaaaaatctctcgcttttttacataacagaatattataatcattttcccatgccatgaaacatttttcttctttaaattgatatattatagtttcacagttgtacataaaacacttttctttcttgaattttaattatagattcgggggatacacgtgcaggtttgttgtgagggtgtaatgcgtgatgctgacgtttgagcttctattgatcccatcactgatagagtgaacatagtacccaaaaagaagattttcagcctttgccccactccctccttccttttggagtccccagtatctattattcctgtctttatgtctgtgtctacccggggattagctcccacttagaagtgagaacatgtgatatttggttttctgtttccgcattaatttgcttagcataatggcctccagctgtatccatcttgctgtaaaggacatgatttcatcctttgttatggctgtgtaatattccaaggtgtatacgtagcacactgtctttatctaatctgctgttgttgggcaccaaggttgtttccacacctttgctattgtgaatagtgcggcaataaatgtacaagtgcaggtctctttatggtagaatactttattttcctttgtgtatgcatccagcagtgggattgctgggtcaaatgatggttctatttttagttatttaagaaatctccaaagtgctttccacaggggctaaattaatttatatttccaccaacagtgtaaaagcattcccttttctctgcagccttgccagcatctgttatttttttactttttagtaatagctattctgactggtacgaggtgacatctcattgtggtttaatttgcatttctctgatgattagtgatgctgagcatttcaaaaacatttttctagaaaggctatacagttttctaggttatggctaagtcgggatagatttcatcaaagccatgttgtcagatatttaagaagggtacttgcttccctgcatgcttgtttgtgtttagcggaaggcagagtccgcctctgctatgggcagacctgttttattctctacccctgaaccacacccatgcccagatgtcatttttcatgaatggacaggtataagggagactgtatctataagcacaaagtttggggaccagaacaggtggatagagatggcaacatcatagaagtgggagatggtgacaggttggcaattgctcaaccctgtcccaggcctgacttgagccttagtgagtgagagagagcaagagagagaaagctgttgttagggcttgtgggactcagaacacaagaaatgccactttgggacctacgaagagggtgtttccacttctgcttagctgtggccttgggcagtggccctgacagataatggccatcattatcatctaaaatagctgcagcaaaggtagactcctgtgtgaatcggtgtccctaggtgtgctgcagctggctcacactggcaccgtgagagcctttgcaagccaagtgttcaaccatcaggagctgaaaatccaccacagtgatgggagtagctatactgtggaaatctacaaacaatacacatcagggcttttgtctttttggagagctgttttgccagcacaccactttagaggatacacttcaactgggaaacctgaggaggtattaggaatgaaggtgtggacaggttataggaaaccacagggaacagtgacctaggggctcgcaatgttggttgagggctgagggaagggagctctgtccaggatcagcaggagaatcttcttgagaggggatgctcccagcctggggagaccctcagggaaggaactggggaatggactgctatgctcactctcctggaatgtgttgatgaaaaagccaaactctgcaaattatttgaagagatttgttctgagccaaatgtgaggaccatgacctgtgacaaggcttcagaaagttctgagaacatgtgtccatggtggttgaattacagcttgattttataaatgttaaggagacagaagctacaggcagacatcaatgaatacacataagatttacattggttcagcccagaaaggcaggacatctcaaatggggatggattcaaagatttcctggtggattcaaagattcaaaggtggattcaaagatttcctgaatagcaattggttgaaataattaagttttgcctaaagagttgaagtcaacagaaagaaccacgaaggggggttatggaaactaaggttattattatatagatgaagcctccaggtagcaggcttcagaaagaataaatgataaatgtctcttaccagaccttagaaggtctgattagactcttagttaaatctctctgggatgagaaaaagacttagaaagggaaggggagtctctgcagaatgtagattttccccacaaatgacaactttgcaggactatttcaaaatatgtcaaataaatatagtttggggttaaaatacttgtttctttcagagcctgctatctgtcatgtgatgctatactacagtcaggttggaatttggtatttattactacaaagagtctgtttgtcatcttaagacctctgttttaatgttaatgctggtaagttgtgcctgaataccaaagggaggaaggtattttattaagaggcatgtccaacatcccctccccattatggcctgaactagtttttcaggtttctttgaaatccccttggccaagaggtgggatccattcagtcaatcaagcggcttagcattctatttttggcgtacagacccttctgcagacacctgatctcctttggttgaatccaactggtagacagacaaagagcttgttgctgcagtccccagtgatcagtttccagggcagagccagctagagagtgaggaggggtcaggaggggcttacatagatatcagtccatctccctgtgtatgtggctttgggacaggaaaactaggtaagagcaaaaaaagagggcttgagcacatggggactccctgcaaatcccccagaaatatttgtaggggtctgaaaggtatgtaggtagggactctaaacatttgtaagtcaaattttatgtggctaatttggagccccaggctggtaagagctcaggaaactcaggttccataaacagtgcctcattaaatattctttgcataaaataggttgatgaaaagagtcaaactctgtaaaatatttgaagatatttattctaagccaaatatgagtgaccaatggcccatgatgcagccctcaggagaccttgagaatatgtgcccaaggtggtcagggcacatcttggttttatacatttttgggagacatcaatcaaatacatttaagagatggcttggttcagtccagaaaggtgggacaacttgaagagggggctgccaggttataggtagatttaaacattttctgattggcaattggttgaaagagttataatctatagaaagggatgttggggttataataagaggttgtggagactgaagttttatgatgcagatgaagcctccaggaagcaggcttcagagagaatagattgtagatgtttcttatcagacttaaggtttgtgttgacgttaaatgctggtcagcttttcctgaaatccaaaagggaggagggcataatgaggcatatctggacccctctttccatcatgacctgaaccagtttttcaggttacttttggaatgccctggtgagagaagggatccattcagatggttgggaggaccttaaaattttatttttggtttacgaatgtttgcacactttttgttatttccctagaataaagactggacctccaagccaaaattctagggcaaaaggtttctacatttttaagattttggtatatatttcacaccttttaccagaataccgataccaattcttgtactcactgctggtagaggagactggttaatttcacacataatcaccaattcttaacactcttaaatttggaaatatgtgtcttttggctaggtgaaaactctttcatctgtttttaaatttgctttctttagattactagcaagattgtacagtcctttatatgttcattggaagtgaaatattttatttgtcccaaattgtgatcaggaataaataagaagcccctgttttagaccattctaactgtcctttttctctggcaagattcagaggcccaatcttcatcagctgctctaagtggttcaggtcaggaccggctccaggggctgaatgccccaccccaatccctcccagcctctcagcatgggcagggggttttgagattataaacaggttattctgtaaactttctttgctgagccatagaatgtcagccctctaagggcccttagaggtcatctaggcttgttgctggaaaagagggtcctgatccagacacctagagtggattcttggatctcacgcaggaaataattcaaggagagtcacagaggacagcgaaagaagcaagtttattggaaactactttgttacagagtagggcatcctcagcaggaggaggagcatgccatcctttgtgagtgtgtctacttgcaagaaattagaaggagctctacacttggaatgtgtagatgtgcttaccaaaggtaagggctattggtgttatcaatgaccatgaatcttttaccctaagcctgctaaccgatgttatctttaagtaaaattggctgtactcttaagatatccggacattgtacaggcttgctgggagatgctctgtatggccataaatattacataattataagtggtggtcagcttagaatttggctattttcagaccattagcattaaccttaaacacgctttgtgaatgcctgcctgctcacttcaatatggagtcactctagtcgcattttattaaaccagaggcctggtaaacaggggtttctataacaggcctacatgaccactttgtccttgagtaatgttttctatttacaaagtaatagaggtaagtcatagagaacttgataatacagaaaagtaaaaaagggggaaaataaaaatcaatcaagattcaatatcctgaggaaaccacagtcaaaatattagtggattatgttctaaagattgatacaaatcctttctaaaaacaaacttaggaatatactatacaatttaaaatgtgttcttattttaaatagaaacactttccccatttatgtaatattgcttttcaaaataccagtacttcatggccctataatagtccatcatatagatatgtcataaaatgttttactatttcctcttctgagacatttaagctattttccaggttttgctattataaactactctccagtgatgatctgttcatgtcatctttgctcacctctctgattatttccttccaacaggttcctaaaagcatgatcagagccaaagaatattagccattaaaagcctctgcctcttctctttttctggaagcataggatctgataaaatacacacctctgttctgttggtgagccatgtgagctcagacaggtgcagtgatttgcccaaagccacatagctttgttagaccagggattggaattcaggcctgtctcgacagcctctcgtgagtgccagaacccagccaggagtccatgcttcctgactcctatgccatattcttgccttattccttgcattagtccgttttcacactgctataaagatactacccaagactgggtaatttataagcaccagaggtttaattgactcacagttctgcatggctagggaggcctcaggaaacttacaatcacggaggaaggagaaggggaagcaggcacctcttcacaaggtggcaggaaaaagagagagaagcccaggggaaattaccatttataagaccatcagatctcatgagaactcccttactatcatgagaacagcatgggggagacttcccccatgatccaatcaccccccaccaggtccctccctcaacacctgggtattacaattcaagatgagatttgggtggggacacagagcctagccatatcattcctctttgtagaatatttctccactagtgagaactctcaattactgatcaccaacatgtgccaagaactgtgctaagtacttgaactgcagtatctcatttgatcctgaccctttgaagtggttactgtggttatcctaattttatagatggggacactgaggtggaaacacagcatttcttgtccaaggtcatgatgttagtaccttagagccgaaacccccattccttcttgtctgagcagtgtggtccaaacagaactttctgtggtggtggaaatgttctataactttaagccattcgatacaatagccactagctacctatggctgttgagcacttaaatgtgaacagtgtaagtggagaactaaacttttaaccttaattaatgtaaatggaaatagccacatgtaactagtgatattggataggtatctctggagccttaagtttccctgttccctccatcatagcctgactcaggcagctctgaagagggctcccctaccatccttggacctcagcctggggtgggactcagaatagccctcctaacacgccttgctaatcctgagccagagactctctctgagccaggaccttgtgcctgagacagattcttcagctgcctacagggctggcagtcccaggagctacttcctgtgggcatttacaaagacacactgcagagagaggctttttaatccccttttgttacacattaatgaaaatgtatgtctgtaatccataaataataagattgctcctgcaaagctcaaggtctacatttacactcagagtgaatattattatgaacttcactagaatcttctctgggagttctcagcagagcaccatctcccagaagactctgtctctaaggagggaagtgaaggagcataaaaggactgattttttaaaaatcagcatttaatctgggcacggtggctcatgtctataatcccagcagtttgggaagccaagacgagaagattgcttgagcccaggagttctagaccagcctgggcaacatagtgagaccccatctctacaatttcttttaatgagccaggcatggtggcgcatgcctgtggtcccagctacttgagaggctgaggtgggaggatggcttgagcccaggaagtcaaggctgcagtaagccgtgatttcgccactgcactttagcttgagtgacgttgagactctgtcaaaaaaaaaaaaaaaatccctcataatttactgagtgccttcttcatgccaggccctgcactaggcctggcacatggctccctacggtactttcatagagttgctgtgacacaaatcactacaaactgggtgggtggtttaaagcaacagaaatgtatttcctcacagctctggaggccagaagttcaaaatcaagctgtcagcaggcccgtgctccctccaaaggctctaaggggaaaatccttccttgccttttccagcttctggtagtggcaggcactccttggcttgtggctgcagcactccaggctctgcctctgtcttcatgtggccttctcctgctctgtcagtggcttcttctctcctgtctctgataaagatacttactgttggatttagggcccacccaggtaatcaaagaagagctcaagatcctttgtttaataatgtctacaaagactctttttttcctaataagatcatattcaaggtaccagaaatttggacatggacatatcttttgtggggaccccattcaagtcactatactcatcttattcaatctatataacaactctgagagggaggtgaattagccacgatggactaactgccgcaaccaccccaaggttttaatggtattatacaataacagggcatttctaactcgtgggaagtccaatatggatgttcctgcttgggaggctgtcctctaggtggttgctgggggaaccaggcttcttccatctgtggctgcaccatcctgtggccttgaggtccccctggagttatccagcaggtagactgggagcaggagaggcagagagagcatgtgaatcattgaacatctgatacacagacacattggcctggaagtgacatacgttactgatccttacatcccattggtgaggactagtcatgtggtctgcccagctgcaagggagtctgggaaatgtagcccctgaaggctcagtggcttctcagcatgagtatcacactcttgggatggaggcagggggaaagcaccacaccttgttggtcagctggccacggctgccacagtgtcattcatttacttattcttcattcatgtaattcattatttcactcatttttcagaagagaactttgaggctcaggaaagttaggtgatttcactgtcacagagcatttaagtcacagttcaattattatttattaaggggtgctgaattaggtgcccctcgttcacgtacgcctgttccatctttggatttaacccactatatgatttatctatatgcgtgccaggaacatgattggtaagactgatttacaccacctcccaaattgtactttggctctcagttctcctccctctctcatttgtccctttggagaatgggtagagagagctagagctggaaaggcaggaggcagagaggtaccagagataagagccagaaagggagggggtgacagaaagatagaaagaaactccacgtgggccagatgtcctagaaaagttttcctagtttgacatgtatgggattttggagcagattcagttaggaaagattcaagagcagaggaaaaatacgagaaacataactgagaattgtgaacatgatcttcttttatgtgtttatggaaaagcagtgactttcttctgaatttgtttaaagtccttttgtgtgctagactgtacatcttgactatgaccccatacagagggatggggctgtaggcagcatgaccacaggtccccatcagccatggaaaggccctgtttactcctgtcatctccttttactctcaaatgtgccctagtttgagtaaatgaagtggccatcctaactttggaggacagtggcttttgagtgtataggtctccttcccaaggccaagtgctcctctgggatggaagccgtggtcagcttatctctgaatgttcaggcatagctcaggccctaatgcatagcaggtgcccaagaaatgaatgcagaagccaggaagaaccgaactatagtttgagctcaggcctttacactccaaatgccagattcctcctactacgccggctttggttgaggagctctttgaacacagtgaagcaattaaagagtgactcctggtgtggagccacctgcactgcataccagagggattcacagaggggagctgcatattgtagtagaaaacagctcctaagcttcccacttcagagcctgtggggaagaagcagagtggggctgaggaccgccctccagaaaccactgtcttggtcctgcactagagcacatggcttaagtctcctcctgcatctcttgtgggcaggaggcaggggattataatgaggtcctaactctgaacacaaacatgccagagaggtttgaattagaactctccagagaggaaaattaagcttcaggttttagtttttaaaatgtgcatttatttatcagtgtaaatagcttaagcacagtcttaaaaattggaaactaataaaaaatcatctataattctaccatttaataaatgtactatgtgcatttataaatttttttccaagatttttttttccctttgtaaatggtttttctgtacatagttatcatcataggctgttgtattggttatccattgctgtgtaacaagcagcctcaaaatgtagtggcaccagatgctcaggattctgctgagtggttcttctgggctgggctaggctgatctcagctaggatcactcatgtacttgcagtcagtcggtcccaggggcctcccttgtgtcaggtggttgcctggctatcatgggtgacaggctagtgactatgccatgtgtttctcagcaggctagacgagcctgttctcatggtgacaagatgcagaagcagtagggaaagcagaagctgcaagtcctctagaggtccaagcttgaaactcacactgtcacttacaagcatttgattggtccaagcagatcatgaggctagcccagactcagtggggtaaagaaagtttatttcttgatggaggaactacaaaatattgtggccatttttgcaatctatcaggactgcgtgaagttttttacctttccatttttaatttattatcgcattatgattttttccttactaatacaaaggattcatgacattatttggatagtagacagactacagtttacttaagcatctcccaattattaaacataaagatgacttccggttctccagcacataaataaagctgcatggaacatcttgatgcagacaggtatttctgtaattttgattgtttccttgggatagactcccagaagtggattcaaccaggcataaatggtttttgatattctgataaatgaaagaaatatggattaaataatacatatgccaaattgccctgcaaaattatgctgctttacctccagccacagagagaaaagggattttcttttcttttttttttgagatgaagtcttgctctgttgcccagggtggagtgcagtggtgcaatctcggcatactgtaacctccgcctccaggtatcaagcgattctcctacctcagcctcccaagtagctgggactgcaggcaccaccaccatgcccagttaattattagtatattttaattttttagtagagacagggtttcgccaggttagccaggctggtcttgaattcttgacctcaggtgatctgctcaccttggcctcccaaagtgctgggattatcagcctgagccgttgtgcccagctgagaagagggattctcagcagcagcctggactcaggcatccttgcagggcctcctggcttctcttgattcattttgttttcctggtgcctcatgccaggaagctggaatgaagcacaactgggcagacccttccttgggcaaaagtattagtgtctgtggtcattgttctctgacagtcagttctgtggtacataacgattggttcaggcccctgtgatcttcttgtccatgtgagactggatgaggagtctcctggaccagtgatggtaacacctgcaccctgagctggggagcaggtggtatcacagacgagctcccatcccaggctggctctcacagtccctttccacagctgtgttaccagcccctgctcaatcatgtttccatgtgattctcatggaaaccttgtgtgattggcaacaccaagatttgtcccacatccagatagagactaggggctagaatacctctcccctgcccgtttctccgggcttgacatttcagccagacacctcttccacttcctcaaaacttatctgtctcctcttttacttcctcagttccttgtttgtctaaaacaccagctaactgataattgcatttatagttactatgttttcctcctagataacaagcttcattgaagattttctaaaaatatttggctctaatataagggaaattgggatcaccatgagcagtgagttggtgggagagagattgggggtacgtttatggaaaatcacggatccgtgggtctggaagttaaaagaggactggccctttgagcaaataaatgaagagtaagctggagagcttgtgtgtatagcatttgagggcaagggctctggagttcaacacactcagcctcaaatcacctacccattattggtcgtgtaaatgtggccaagttacttgactgctctgtgccttggtttttccatctctaaaatggacataataacccatacagggttattataaggattttgacaagaaatggcaggtagcaataattacacctactgaatttaaaaagtggctcaggcacaagaggtgagtggcctgttcaaggcagcatggcctggaagaccttcagcaggggccagtaagcttactagccctcatacccaggaaagcggtttatttctcctcccacatcagcatccctctcttcttcctatgtcggccccagaaggttcacaccctctccctcttaggctccttcctcattccgaggcctggagggtctttgcacagagaggaatctgcttcctgcctagagcttggagaaccccaggccttccgcattcatgaggtccaaggccaggcaggaggcaaggccatgggcccaaatctgtgccatgagtgtcaacagaagatcccaaagctggagaccccaaataaaaaccccaagagatgtgggggcatcagcttcctcagactcaacccagcaccattcagcagctttcaagaccaagaagtccatactgttctcttgctcgcaagatactcagcctatgaaatcctcagctaatggagtcctcagagcagcatggagccttgggggtgattttgaggaactgacactgggaaacagcctagggtctgtggtgcgcatggtgggcagcagcccttgcctgtccacaccacggaccagctaaccatagacgagttaagagtgacagcatgctactgctagcgggggaagctgcacgtgccatggttaaggaccccagggctgggtctgtgccccatcatgttgcgtaacaagaaagacaaggattgcaggtgctttcccacaactaaggtgggtgcagctgctgggaatgggagaaacatttatagatctaaggatgggcaggaatttagaaaggtaagggtactgtctgccttggctgatacttttatttccttctatccataagtgtaacaaaaaaatttttttaaatgctatgtaaagatagggaggtttgaaatttttaccaacaatcccaatccttgaacacaaagactattatcatatttgtgactgttgaatattttttaaagacatgttaatactacagggaactgcatttctatagaatgcactttggaaagcattgccctacagtatttataaatttcagaacacattttaggatctgccttgtgttgtttctgtcatcattttacatttgctagtcttgacttccaaccacccaacacgcttcctgagggcagggcaaacttggacattattgacagaacaagtgcccaatctgaaaatgtgtcacattcctgctcaggttccaaacatgtcatagcggatttatgggtgtaaattatactgtttgctcaaaacactacctcatcttcagtggcgtagtgacagtgaccttcaaactatggtggcatcttagctataggggtgtccctcaaaaagcatgggctttgttgaagcacaacttactctgctgtgtgacttaagtcaaatagcttaatctctctcagcctcaactttcccacctgtaacctgggcaggataatagtttttagcttctagaacagattaagggtggtaatatgagtggaccatttagagtagctcatgagataaaactcaaatgctagctgttgtcatttggctgttaatgttatcttgaaatcccacagtagtcaatagtggatggcattaattggaggagggaattgttagataaaagatggttactagatgatagaaggagattcaaattattgactggcagagaactgtttatggaagagttcttggctcgtaagagcctcagttagatagagcagggccattggagggagaccagttgcttgaatgcaagctgttaatcctcagggaatctccatggctcagccagatcctggtctgtaatctgctctcaccacgggctgactgaatgagctcattgtcatgtaatttaataggagccaggtgtctgtgatttccaagagcgtgagcagaatcatcctgcaccccaaactaggagggggaaaaacacctcgcagaagcacacttgtccctagctgctttccatgtgtcagacagagaggaaattgtccaattccaaatgcattcctatccttctcgggcgatgagagaaagtaattggcatagtttgagtgaaatgaaggtggtggtttggggtatttggtatttcttattggcataaaggaaaacttgtattttaaataccccctggcttcttgaagaacgctttctctgctgtcactgcggcccttgtcaaaaaaaccttagctgaaaagaaaaaagaatgcacagaaaaagagcagcagagtgaaggctcagtcaggcggtgggtctttttgcgtgggtatttgaaggaagaaggaaggtgctggagggaaagtcaggctgctctggaaacatttcagtcctggaacacctggtctctaaaggtgccatcaatagcacacactccccaggcactgcaaagtgggcaagcaggtggggtttgccagtgagcaaccctcagggctgcagaggcgggaggggcagtacggggagaggctctattctagggacccaacaatcagtgactgttcatctccagactcagcctgattactgatgcacccgagctcacacagacctaagaggcagatccaggatgtgaacactggtctggctgatgctcaagactgtgccattcctctgccctcatgccatctcctgaagttgaaatctcaaacttggctgtgtcaccactgtcctccttggctgggagtgggttcataatttacaaaaatccatcaggacactcccctgggaccacctgccttcagggtcttgaggcctcaaaaagttgccctcagggattagacctggggtcacaatgtgtgcaatgtgggtgtgaactcatgtgtccagttgctctcagcaagccaacaagttcaagtcacttctccatcccacggctttgctcttgtaacttgggaacaaacagtaccccatgaataagttcacagaggcagggttgtgcagtagtgacacgcacaggctcttgaggcagtctgggttccaatccacccctgccaccaggatcgccatgtagggttgtgtggcttatggcccgttccagagctccaggccaagatgacaaggggggcccagcctgtgccactctactaagccatggtccctggaattccaccgacagcagggtgtcttatgccagttctacaaagtattcacatgggcgaggcctggccctgtgtgctgctaagagctgaggaatttggttgagttacataccctcagtgtgcctcagtgtctttccctgtaaaatgggcaacataatgtatttctcctctgggttgtcatgagcattcaaggggttaatacccagaaagaacttagatcagtgcctaaagtctggtaaatactcaaaaacaagtagtaaatatctaagaggctagctgttagcatttgactggcatttttaagtgtgttttgctaaaggccaaatctgaatccatagtgttttccagttttatatgattttgttctaagatccagtgtaactatcaggaatcctgggcaaagccatcagagtgctgtgagcccctgccagccatcccgtctcatcagcctgccctgtgcagggcctcctgagtcccccactcaggggatcacagacacagtgcagggcctcctgggtcccccactcaggggattgcagacatagcatgggtgcacctgggtcccccacacaggggatcgcagacacagtgaaggtgtaccaggtcccccactcaggagatcgcagacacagtgaaggtgtaccaggtcccccactcaggagatcgcagacacagtgcaggtgcacctgggtcccccatgcagggtattgcagacacagcatgggtgcaccgggtcccccacacaggggatcgcagacatagtgcaggggcacctgcatgttgttcttgcaccctgaaatggaataggaaggctggcttttttttttttcttttttagctcatcttctgttttggaccaattaaaataaaggcattttaaataggccctgtggaaagggaactgaagttgtttccccaggctgagctctgcaccagaggtcagggcaggattaataaggaagctataaatacaaacaatggcccatgtctctgtgggcaatgtgctctggtttgggaggaagggagaaaattaaattataatgggaaaatataaattatttggatcaggataaaaaggaagaaatcagtggtgtctgaatgaatctcagtgaatctgtcagaagagttgtgaggttggctcagtgtaggtgcacaaagatgcctaggaggatggtggaacagggccccacacagacgcaggtgaaactccagagtcctgccttttactgttagccatgccccacctgtggaattcagtgctattctgagatgagagatgattgtatttgtcagattttctatcaaagtaaatatagatggtcacccacccagtgaatgtgattttagcaccttccctgttgcagaccctcccaggtactggaggtttagagggaaacagagccagctctatgttgccctcaaggagcacccagacatatcatgtggccaagatgattgcatccaagcgatgctaattgattgcagccttgcatggacctggccaggtgctacagctccttggtagcacttgctcacttttatttcatggtacctcctctccccgctagggggcaaatgtcattatgatgcccattttacagataaggaagctgaggttcaaagatatgaggggacttcctcacagccaatatgtggcagagtcatggttcaaacccaggggttcgtaccttcaaagaccaagttctcatccactgtgcagacaaatgttctgacagaggacaggcaggggacagagagtgagagaaagagagagattgtgtgtgtacatgtgtgcacatgtgtatggcagtggctctgtgtcaacctggaaggcttcttggaggtggtgatgtctagtggaatcctaaaggaaaggtcttaaatgctacactaaggaatttggattttatcaacattttttttcttttttgagcagaattcagacatgattatatccccccaacaaatctatatttaataagcaactccaaggtgccagacaatcttctaggtgcagagagggttgcagacacttaatataagatgtagtctctgccctttcctagcttcagtctagctggagagatgaaacacagatttatttagaagataataagtaacagtgtcaataaaccaatgccgagcgccaaataaaagtcagtgagtaggtgagtggaggtcagaagagggggcagtctgggctctgggttggtcaaggaaggctcccagggtagatggagagagagaggttggaggggttatggaagattccagaaagggtgcactttgagggctggggcctagtgtttggcagtactagttcccccatgcttagcagagggcctgcccatagcaagtgacggtgcatgctggctgaatgaataaatgttggacccaatgaaaagaaaggacaaacggttgagagatgaggcataacaaacggactgtgggttgcagggatgtgtgaccactgagcctctacccagcccaccaatacagtttagttgacttgtggccccaccagtcagatgaccttccttggctttccatttttttttaggtcatgcaggcacatctgtgggagaagcaagtagactctataggggaaaagcaggagaaaagatgggagaagccttgggtgacagaaggaggaagccttgaatgtgagtccaacatgttagcttttttcctgcaggcaggaggcagccattgaggcctctggacattcaagtagcaagaggtaaatgatttggggagattgatctggccctccaagggggaaagaggaaaaatgctataggagagggtttcaggaagtgactcctgctatttaaaacgtgcaaaccctttcatccagaaatgtgacttctggagatttgccccaagatcgtggaacaagtgtgaagaaacaaaaacaaacaaaaaccagcaaaatgcctcctggaggtccttgcagtgctgtcttgggtggagaaaactagaatgcagctttctccaggggtgcagtgcagagtgagggagcttgctttttctctgctgcctctcacctcagggcctctgcaccagatgttccctctgcctgaaatgcttttccctgccaggtcacatggctcaatccttatctttgctgaaatgcccccttctcagcaagaccttccctgatcaccctattcaaattttcttctgtagccccaccccctcatttacaccacacacctgccgccccaggcacccagcctcgtgactatctgacatacccttcattttatttgtgtatctcctgtccctctggaatggaaactgcagtggcgattgttgtctgttttgcacacaggcagtatcctcagtgctaaagcagcgctgggcgtagtaagtgctcagtgaagatctgttgaatgagtgaatgaaggaagggaggaaggaatgatggtgggtaaatcggcgagtgtgtggcctacacaggacattagcttgagcaccagagagcagaccaaggcaggtccttggttcctgtgccgacctgcattgcggaggactgcggggtcttggtagatgaagcctggcctgggtctttcagggccctctggctggggccaggaggcacagctgcagtggacactttcaaactcatcgtgcctggccttggcactcggtgggctcatttctggtcataatgacacctttctaaacatagctacacaaaattaaaatgtcacagtgcaaatgctgcagctgtgtggtactagaaagaacactaggtcttgagtcagaagagatggactcaaatcccaaatatcaagccatctctctcctgggtgtgaccttgcacttctctgagcttcagtttcttcatctgcaagatgggaatggtaccagtagctgtgtcacagactgttgtgaaggccgaggaattaagcacggcgagagatttttggaagctgcaaagcatcacacattggacatgacttttacacataaatatgtaaaaatggtctcctgactgcgtccttggcttcctggcctgccacatggaatgagggcagggcctccctctcagcacagactggtctcctccaccagcccagcctccccttgtcacagtgagaaggagccattgacccactcagaagccactcacttctctcttacatggggaaatcagcaaaccacaaccatttatgaatcctgcatgttcccctggtcttgtccaactgtatctgctaccattcctgagtggaagttaaaaaaaaaaaaaaaaaaaggcagagcaagttgaagatgggaaagaggtgacctaaggtgacaaagagtcaatgtagaaggcagatatgtctcatcctcgcagtgactaagattaatgggcatggagtgtcaggagccctgccttaggaagaactctgagactggctccagaattctgtaaatccaatcaagagtgttgcaatcagttagcaatgtctgcctcaggcaagggagaagaaactatggtctgtatgtcatatctaatattctcccttatatctaaggtaccctctgctgtgagacatgcaatcaacccgatgaagctttttaggaaaaagtctattgttacatcaagtttaacgtaaagctgcctccttacatattttaaggtcagcctaaaggtttctctgcacatcgtgaactatagcaagtagagatgtaaacagactgtagcctacacttgtgccgatcaatgagttttggccaatcaaatgtggccaactgtttgaaccatgttcaaacagggcaaatgctgagctataaccaacccagctgtttctgtccctcacttctgttctctgtgcatcactttcctttttctgtccataaatctttttccaccacgtggctgcgctggagtctctgagtctactctggctcaggaggctgcccaattcaaaatcattcattgctcaattaaactctttcaaatttaattctgctgaagtttttcttttatcactctattaatgctagatgttgactattgaatggatccaagtttcaggaacttacaaaatgtgtgtgtgtttgaaagaaggaaatcattacttgctatcccttctctatcaaaatctacttgagcttttcaactaaaaattcaatgcgtattctttggggtataaataaatgtgctgaatctacctgggcttttcccactctgtggcttcttgtttctatgtgtgatgcgaaaaggaagctgtggaaatggggaggagattcttccaggtgttgggaaggcttccaatgcccagcatgtagtaggtgctcagcaaatgtttgttgaatgaattttcaatgatgacctcagtttctgcataacttttcatgattcataaatgctgttaccttagctaagtttaaatgtagtattttatctcctgtcatatatatttttctctctttttctgtgagtagacgccatgataatcaatcgggataacccacgaggacgttgtttcattctttctgagtgaggggatggggctgatagaggaagccggggaggggtttgcctgctgatttcttcctgcttttgtgtttgtgtttgccgtctgcctgtccctcacatttccctcagtgtgttcctatccttggatccctaatcctacagcccaggactttctacaacggtactactgacattttggatgggataattctttgctgtggggggactctcctgtgtgctgtgacatttagcaatatccctggcctctacctactggataccagaggcaccccccacccccagccgtgacaactaaaaatgtctcaagacacaccacccaggtgagaaccactgcttagcctccccggggaacatggctggttccttctttctgaacagtttcagaaggaacatcaagtctgcaacaagtcttctgacttcatggtccacaccagtgtcaggcccaccgtcctatcaaccctccaggctcatgtctccaaggagctctctgatcattccctggtgtctctctcgtttgctgtctgcccctctcccctgggctatgagcgccacaggagttttttctattttgattatctctctatccctggggcccagaagtccctggcactcaataggttctccagtggataaaggtgaggacgaggtgactgggggagcctccctgtggagtgacgtctccatgccatgaaattgccagccctgggaagtcatgaggaagaacactccaggcagagggcacagtcaccgcacagctctcaggcaggaacaggtttgccttgtggaaggctgctggggaggagaggggagcgggattggagaagggtgctccaagagccagaaaagctagtcaggaggccacagtgaggggtgcaaactcagttccaggagtgacaacaagccctctggaaacctcccagatgtcccaaggtccacccctggcccactctcactctcctctctccttgtcgcccagcctcactctgggaaggctggggaggattcctaaatctggtctgaactcctgaggctgaagccagagctggtgtggcccccaagtcatatctcagggtgggagagagtccttccatcaaggaggcaacgctatgagggcagctcagtgctcagcccacccctctaaccctcatgggcgggccctcaatcagaaaccacaaattccaggctcagtcagggaaggcctggatcctccacttccggctcctcccggaagtcagcttaaagaaatgatgcggaggaatgatcactgaagagactcgtcattcctggtcaaaccatgctggaggtcaggggtttgttaactcagccttgtcacaggggccttcccttccacctcaatgctacgacagagctggtgttgaaggtctttgacgaaaaagctacatttctgcatttaaaatggagaagatcaggccactcagtatctccggtgtaagaagacatttggcaatagtaacagctaattttttttaatacttaccgtaactcattttacccatttcctgcctagaaaaaaaaaaagtgcagctcactgccagcactcatttcttggggcaaacaggaaataagttaatcttaacaacaaccctgtaaggtgcatagttttattatcatccccattttacagatggggaaactgaggcagtgaagtttagtaattttcccagattcactaaaatttctaagatatgtttaacaaagaaatccaccctttaactcttaaataatatcctctttttaaaattaatgctagaatatggtgcaatatctttttaattgagtgtatcttttgccccagcaattctaccactaggaactgagcctaaggaggtataaatatttagttagaaggatgcagtattatttagtatgtggaactcaatgagaatctccactaagaggggttatttaaataaactgtgatgcctccatataaatgtagctgttcaaaatgacatctgtttgtatgtaccaacataaaaagacatctaaatcatatattttaacagaaaagtccagaataatcacatttttgtaagcagtcattttgtctgaggactgggatttctattgacttttaatttcttattttcacgtgtctatagtctctaatttttctacaatgaacatgtactacatttataataagaaagaaactcaataaaagttattgagtaaaagaataagcagccagaaatctgtctcttctggggaattagtgagcctcttcctccctgagagtagacgctatggctgctttgctggaaccttccatttgtcccaaatgctccactctctgccaatgggagacggggtctatattcacctggtcccttctgcgtgaggccaccttggcagaagtcactgcccctcccaaggcatctgaccctgcaaaaccctcttgtcgtctgggttctggtaaactccccattccctgttttttttgtgggtatacagatagtaaaagctctgctgccctggccctggttttaaatgccccctggtgttttctctatacgccactgacaccttgatcatgagtcaaatcacctgaacatagagtagcatctgcttcctgttgagaatccaacgaatacatttacctgatttgctctctcttcttttcctaagtcctaacttcctaaaataaaatgactctccaattcacctgtccaccttggccttctctccttatacccagtcttgcccactagacgtcttcgtttgggcaaccacacagcttataagcctcctgatgcccaccacaggagtcttattttgtgctgccacgttaaattctctcttccatgagcaccactctttcactttccacccactccaaacctgaaaatcacctttctccacccctcctttaattttttacatctcatcagtgcccaaaacttctgaaatcaacctcagtaatgtttccttcaaataaccccttcccggctgggcgcagtggctcatgcctgtaatcccagcatttggggaggccaaggtgggtggatcacttgaggtcaggagttcaagaccagcctgaccaacatggagaaaccccatctctactaaaaatacaaaatttagctgggcagggtggcatgcacctgtaatcccagctactggggaggctgaggcaggaaaattgcttgaacccaggaggtggaggttgcagagctgagactgcaccactgcgctccagcctgggctacaaagtgagactctgtctcaaaaaaacaaaacaaataccctcttcccatcatttctccagcccttgcctcctcaagtcctcctgactgggttcccttggctccctgcttccccctcagtctgttatgtgtgacttctgggtaaaggttcttaaaatacaattcagatcctatccagtcccctactcaaaactgtgcccatgggatcaaaaccaaactctgcaacattccattcagagctttaagagtacttttcagcctgaggtctcctcctcaccactaacacccttccctccaatcaaactgatccattgtacctacaaaaagcccgtcccacctcctagcctttgttcacactgggttctctgctggatcaccatccctccacatttccaggtgtccctcaagactactcagcagcagctatccatacaagttcctcaaccctggctttcttgccctcaagtaaccagttcatcctccccagtcatatagccctctatttacatttcttttctggaagctatcatttttcacgtgccatttgagtgagtgtcctcgctaagacgatattttctttgagggcagtaacctttcttatatgtctctgtatcccatgaacttagcaaaaaacaagggacagaacaggtgcaaagtctacgtggttagtgaatttaacagatcttcctaacgtgtaaacgtcgttgtccaggtgaatggaagaagtgagctgagatagaggggacagacagagtcagtgtccagtgctgacctctgaaatggaaaaacatggccagtccttaggaggctgcagaggccaagaccccagtgaggtttgggggttccacagcagaggaggagctgtggaccacagcaggaccccgatgccatcagcaggggaggaagtaatcagagaggtggaggaaggaagccaagggaagtcaagtaaacaccaaatattccctcccggtccaatgctgtgacctgcataagccaccactcccccagtctagactctacccatggaagaaggaagaagatagaactctggatttgaatataattctaaaataaccaaatttatctgaaaatgactaggctgagttttctgcttcaaccagaaatggagcttggagtcagaaattatgtgaaattatagaagagaaagtcaccatcttccatctctgagtcgtatgatcattttagacataaaattgtgcacttacgatgtaccaagtgcttaatatacgtgatctcatttcaccagggaaactgtataattcattgctttaactgacaaaattctgcaactgaagaaggtgctgttaataattgcattgggacgcaggcctgagcaggccatgatttgtggctgtcctacatctgaccctcacagtatccatgggagaaggcagcatgtttatgccccctgacagctggggaaaccaacacttaaagtgattaagtcacaagtccaaaataaatgacagagctgcagttcaagcccaggtggtcatttaccaaaggccatgctcttttcactttgcatgggactgtgaccgctggctctacccagcttcccagtgcgacccttccccgcccactgtttctcttctctggccaacggaaacacaatgagaccacatatgtaacattacattttttcatagccacattgaaaagaaaaaggaaccaggtaaaatccattttaatatgatattttatttaacccaatacagttgaggcttgaacaacacaggtttgaactgtgtgggtccgcttacacatggcttttgttcagtctctgccacccctgagacagcagggccagcccctcctcttccgcctcctcctcagcccactctacatgaaaacaaagaggatgatgatctttttgatgatccactttcacttaataaatagcaaatatatgttctcttctttatgatttctcgtaataacattttcttttctctagcctcatttactgtaagaatacagcatattcccagctactcaggaagctgaggcaggagaatcacttgaacctgggaggccgagtttgcagtgagccaaaatcgcaccattgcactccagcctgggcaacaagagcgaaactccaactcaaaaaaaaaaaaaataaaaagaatacagcgtataatgcatgtaacatataaaatatgtgttaatcaactgtctatgttatgggtaagtcttccagtcaacagcaggctattaggagttaagtttctggggaatcaaaggttatacacaggattttgacggcatggtggttggcactcctaactcccacatcgttcagggtcaactgtatattcaaaatagtattcaaaatgtaatcaataggaaatagtcattcatgaaatactgcgtcttcttcttctcccccccaaccccacttctttgtattcagtcttcgaagtcagtgggtattttaaccttacagcatatctcaattcagattactcacactctaaggactcaatagccacgtatggctggggtctgccagccggacagcgaggtctagccctgatctgagcaggagccatttgattgggttgttggtacactgccatctggtggacagatgttccttgcttgaaaaaccacctcgaaggaaagtatcagcatcagggacaatagcacagtgggcctcaggatcagctccccggaaagagcttggggttggagggggtgttgttgctgaggatgtccccagagaagatgtacagccatggagcaaactcaagtcacttatgatgtcggcaaaccttggccgtggtgcactcttgtttcctggttgcaaaaggatttagcagaaaatggtaactctttttcagaaggcatatttaaagcagctctttaaaaagcaggagtttctttcacacccagtttcgccatgtggttgtgtgaagggcttctccccagaaatcatgtggtctctcttttaattcacagtaaaaacctttcttctgtcttggcccattatggctgctataacaaaatatcataagctggccttatataccatagaaatgtatttctcacatttctgaaggctgggaaatccatgattaagagttggtgtctggtgggagcctgctttctggttcactgatggcgtcttcttgctgtgtcttcaccgaggggtagggacaaggcagctctctgcagcctcttttctaagggcactagacctatttgccatggttccagcctcatgaactaatcatttcccaaagtccccacctcccaacaccatcatcttcatgattagatttcaatatatgaatttgggagaggatagaaacattgagaccatagcatctgccaagttgtgtcttcctcactcaaattgggtaggtgtggttattccagagtttcagtgaaccaagacgtatttttccaatgtgaataattaattaagaacacttgattagggtcaatgttattctggacttctgaatcactcccacatttgaaggggagttttaaacacaactttgtgtgaataaaatgatgtgtctgcatctctccaggaagcagtgtttggagctgagatgacttggcagggagaagaatccactgggacattcaataacttggcattgagagtgttttcagcaccatgctgtcctcagaatagtgttagaatttatataaacacagatgtgacttgtgccttgaaggagaatacagtcttcccaggagagacatgcaaaaccatcatagacaaacagcaagaaaacagcatcaaggatgtacatgcaccgggcagaatgtaaactggatgtaaaaccaagcatttgagggcaatgagaaaggaacttggttctggtctcaactctgccacccacagctgcgtgactatgtctctgtcacactgcttctcaggtcttcaactttatcgtctcatactgagcaagagacagtctggacaatttatgcttctagaatggggagacaagaagaaaagaaagatagatacccaaggacttcagtgactggctcaggaagaattactcagcagtgagggggccagcatgagcccaggggcaagaagccgggacttggaacaggaaggaaaggtgctcagctggctaacctagaggaaagtgattggctggagtgtctggtttatctgtttcagggatggttaaagattgccccgttaataggcaaaaattgttgccttaaagaacctagaatctaaaggggtctttgacataatacagaataacaggtcccagagattattttacagaatgttagtacctcatgatattaatagatatataacaaaacagacttctttgccacaagacttctcagtacctttaacattttatgattttcccaaaggacaaagagtatgcagcatttcccagacttaaatttaactgtgaacacctgttatcctggggcaggcggattgcttgagtccaggacttagagtctagcctgggcaacatgacgaaaccctacctctaccaaaaatccaaaactcagctgagcatggtggcatgtgcctgtagtcccagctgctcaggaggttgaggtgggaggactgcttgagcccaggaggtggaagctgcagtgagctatgttcacaccactccactccagcctggacgacagagcacaaccctgtctcaaacaaacgaacttcagtgactggctcttaaaaacaaacaaaaacctcacagaaccctcactgctctagtcctgactttttatagatagggaaactgaaaagctaagaggcaagtccaaatttcacaaagatagtggcagagccaagattggatttttggtcttttgactctaatacccagtgaatttctttttctttcttgttttttttttttcaattcctattatacactatttaagacacacaaacagataaaaagactaatacaagatatccatgcaccaccacctagtgtaagaaataaaacatcaccaacacaataaaacccccttgtgtacctctctccatttgtctccccaagggaacccatatcctgaatttggagatataatacatgaaaattctggtggaatttcaaataagtcatattgtctttagaggatcttcttagcatctcccatgatgtctaagttgtttcaaaacaaaaccaaaaaccccacttggcccagaagagcaaagattaaaagccagcctcgaggatccccagcttggctacctgcagctcacagcatattggaaaaattttatgaatcggtgaactttttcattctcaaatgggctcttcagatggtttattaattctgttagatgcgggggtgcgtctggctttattctgtgtggaatttttggatgaattcactgcctcaccccctcccctccacaggccagatggggagccgggtgctgtataaatgtttaattgtggctcagtaaaaatatttgctttcagtagctggaagctaccaaacggaggtagcgctgtctactagagttgccagacttcattctaatgagaacagaaataaaggctgattaaatcaaattccccatagtgtagaaccacttaaataaatgtttcatattgtttgcatgatgattttaaaatgtaacagctgcttatgtaaccattaggctggacataaatcattcatcgccatcactgccgtcaaagcagcactggctctttttcttctgctgctgacatttccattactagggagcttctcagacatgctcttgggttccctgtccttacccaagtgcggggtagcaggagactgagggagggatgaggaatgaagagcaggcacgaagctgccatttatcgaaggcctactttgcacatgtcccattgggctggcattgtcacatttcatccttcccacaaggaggcattactgttcccattttatagatagggatgctgaggcctatggaaatgaagtgagctgcccccagagtagggaatacagcctgtatgtgaactcaggtgtgtctgagccttggcaactcacacaaggctgcccgagaacaaagggtgcatcccaccccgaggctccacacacctcaggccttttagcaatgatgagagcagtgaagaccagaccaagactcagaaaactgcagaatcctttcggctggggctaggggtggggcagggtagatactgatccaaaggatttggactccttttcctagtccaaatccccatcgtctctcccctgttcactgtgtcagcctcctgactcccctgcctccattcttgcccatctcaatccatcattcacccagtagcctgagcgatcttttaaaagtagaagtcagattatgtcattctcctgctcaaaagcctccaatggcatcccaccactcttagaataaagcccaacctcccaccatggccctcaaggccttttatgatatggcccctgccaacatttgctcattcgttcctaccccactcctttatctgggcgtcttggcttctttctggtcttcagacacaataagctcatgcctacctaagggcctttgcacatgctggaaccatcctcctcagacccttcccatgactagcttcaacctgtcattcagacctcagctccaagtcacttcctcagaaaggccctccctgtaccctggattgaaaacagccctcccctgcacacgctccacaccatagctctgtttcatttactttacagcactgaacactgtctctatttcttatttgctattttcctatcccactataatgtaagctccatgacagatatctgggcggttctccactgcttccccagccctagaatgctgactgtaatgtagtaagtgttcaataactattacttaaataaatgaattaacttgtctcattcttttcccctgcatccaagttgggtgaaccctgacctggccccttgaaagagacaatttgattctgaaaaccaattcttacctccaggctcaggccccatgcaggagtctttctccaggtggcctggccatgcaggtgatggcagtcatggggggaggcagagagctgctggagaaaagctaggaggccctttggggttccctgtattcataggaaggaggatcccttggatccatgcccccaactctgcaaagctgagtctaaaggatacacagaacacaagacatccttctgttgccaccaaagcttctgacaccccattttggctggagagagacttgggcacagttcttgaattggctgcaactccaccctccctcctgcaagtgcctcttcctctgccacggaagcctctgtgccatgaagaagaccaccagacctctccaggtgagggctctgggtgtcagtcccctacgccctagcaagatctggaaggcaggagccaccttcctgcaggcaggcaaggtcctggaaatataaggttgtctgtggccattgaccatcctactgcttcctggtgacagaaaatgttgcattggtggcagccatggggacagcttcctggttcctgaattgcagcactggtccgtggcatgctctaggactcaggcattttctcagcagcttttgaggtagtggccccgggcaggtcagtttggcagtgtgctggggattattcctggaggcccagcctggtggccgcttctccagcccttccagtgatttggaagcggctggttccttgcagtaagtcccttcttcctcgaaccactgactgatgcagagctcctccatggtagggactggttctcttaggcccctgtatcctcaggcccagcatgcttgggaaaatgtttgctaatgctttgtgactcaaaaggaatcacacacacacacacacacacacacaaacacacacacacagtttttaatattatcagtcatatcagccccctgaggcagctgctctgttccagacaaaccctgttaataacattcttatcctctttgtttcattttccagctcaatttggaagcctgaccttgtcttgctttgcctcctactgagagttaatactgggacatactgaagggcgaaggcttgagtcacaaagtcacagggataaatcctagatccagcagttactgtctacatgacactaagcagattagttgccactgggactcagttttaccagtctgcaaaatggagctatcagccgcatctagcactaggggcgctgtgagcatggagggcagtctgcacacagaggcttaacacagtgcctgagcttgcaggtgcttggtaaatggcaattgctgtcagcattgtctgatttacctgaaggaacagttcacactccacccagattttcactgcagcagccaagaaagaacttctgggaaagcatctgcttccacccaactcccaagaggggttcgtagagggtggagctgagagcccgcctcccctaccagcctgcagaaagaaagccatgttttggcctcagggaggagaaacccagataaaaaccaccccatgtgcagcctttgcgtggccacaggaccagctccacagggagagggaagaggcgcggccgcaggaccagctccacagggagagggaagaggcctcctttcaggggtggggagctgagggcaagacagaccttttctgactcagcccaaggagggctggagcaggggctgcaggttccctgctttctgctacaacacagggtaggggagagtcatggcctcccagagcctctgcaggttcacctgccaaatggaaataatagcatcctcctctgcaagtcacagccttaaagaggtgctgagagtcactagttagacccaagccagctgtttctggtgcattaggactatcgaccagaacccctgcattcccagcccctcctgcggcctccaacgaccaggagagaaaggcgtaaggtgtaagactctgggccaggttctggcagcttatggccactcttttcttgtgtctggacaggagcattatagctacaaccatctcatctaatcctcactgctgccctatgaggcgggcattcttatttccccagttttgagataggcacagaaaggggaagcgacttcccaggttcacattgccagtaagtggtaggactaggccctgaaaagcacagcctgccatggggaagagaattcatccccagctgagaaccactgtatcctcacccaggggttcccagccaatgcaaacagggacgtgaccagtctccactggtcccctgtaccaggtctccaccttgccggcctgctgctgggccccaggactgctcccaggctgcacctgtggggtctgccacctcctccacttccttttgagaagctgctcccaccccttcgccttcatctcaaaggaaagtgtgctgccaggcagctggagccagatggcccagagacaactcttcccatcacacttcctgcagcatctgagtccaacccccaactccagagctggcaagctgcccagagcctcccagaggaggcctatgggttaacttcacatttagtattttcagcatatggtagaaagaaaatagtgttgttagatgtacaagtgtgatttcccctttccagaatgccttcctctctcctccacgtggtgagctcctattcatacttcaaaaccatgctcaactattccctgcccacctgtttccttccactcctccccttctaatgtgggtgtgtcccagggacaacatctgtgttcctcagtgaagttgagagaagcctaaatttgctctacataagaaaaaagaataaggaggtaaactggaaacgggaggaggctgggaaacgcagggttggtggaaggacttgtggggatgtcgtggcagccacctgagggtaaggaacgtgacagccagagcagctatgcttaaggggctttgccacagtgcgaaagataggatacaaggtcctcttcagtctctccatgaaaaccacagtcaaagtacacattactcacccatgctttggagctagatttgggcttaatgctgtctttttttttttttattaaaacaatattccaggctgatggaatttaacaacaaggaacataatatctgacacaaacatagcctaagccttgatatttatcatcttatatagcaagagatcagggtgttgagaactttagagcagctccgttatgtccaggctctgggcggtttctgggattctgtctgctgtcccatcagtactcacggggtggctgtgtctgctacagacatcatagcctcacgaaaccacctacactaaagccaataggaagaaaggtgtgtgtcaccttcaccttcccaccctttatgggggaggaaaatatttgccaagtgacccacctttcccttctcaatgcccctttgatcaaagcctggttctatgtccctgcccagctgcgggtggtgctaggaaagaaggtatctggggtttgacagtctgctgtgagggctaaataaaaagggcgtgagaggtctgccctctgcttgtactcctctgctgagggagaacttgctgcttctggataccaccctttcccatcgtatgatagcctgaagtgttcagaacttttcccattaaatcacttgaacccgggaggcagaggttgcggtgagccgagatcgcgccactgcactgcagcctgggcaacagactgagactctgtctcaaaaaacaacaaacaaaattgactttctcccactgagcccaaggtgctttcctggtaacttctctttgacccagtcctgcctcctgcatcttccttcagcaaccctgttctccacatcagccaccagagggaacatcttaaaacacagggctagactgggcatgccgttgtctctgctaaacccctcactgagtccccagtgtctacaggataaaatccaagcttcacggcattggaggctcaccacagtcctacttcagcctagtctctcttccttattcttcccctacatatatatgtatatatatatatattctcatactgtaggtgaagcaactgaaatgctttttattcccctgacactttttgtttttcaaattcttgttgtacaaatttatgggggacatctgcagttttgtcacatgcatagattttgtagtagtgaagtcagggcttttagggtatccgtccccacaatgacgtatattgtacccatcaactaatttctcatcatccactcctcccccacaccctcacccttccaagcctccattgtctattatcccactctctacatccatgtatacaggttatttatctcccatttatgggtgggaacatgtgatatttgactttcttcacctggcttgtttcacttaagataatgaattccagtttcattccagttgctgcaaaagacgcctcacagaattttaaatgcttatatatatacatacaccccctttgtatttgcctacacaaaactaacaaacctttgtgaaatgtaacctacaggaaatatgatcatgtctaatgctggacatgaagcagatgcaatacacaaatccatgaggtagacccaggtatttcagatcctgaccttgatctcaggtttacttattagaccacagaccaaagactcccactgatgtccccacagatttcaccacttattcctcttgtcccacacactctactccaaagtcaccctcctctagaggatagtcacctgagatacttcagcgaccctgctcaccttggaaaatcaggtgacaggaatcatcagttaagcctgtggacagtaagcatctgttggtctggatggtgtggtgggcggaaggtaggacccaataggggcttttcatggttccagccccaaacctctgaccatgccagtgcatgctgaaggcccccattccatttatggtcggggccacatgatttacatttactgtctcaggttcttcttgtaacactgtcttctccaatttttgataagccaatgcccctgacacttctatgttttgttcaaattgttctacttgcccagcattctcttccaccttctccagctgtcaaactcctacacacccttcaaagcccagctcatgggtcctctccctgacaatgattccagctgaaggagatgacattgctacttccttggctcctatcatacccggtatggctagtgtagcacttaacattgcttggtgcttggtgacattcccaaacgttcatctgtcctcaaggatgggaacgtcctcatttcccatcatttaggaagtgcttgctaaaccaaagactcagcccctcatcaggaaccagtgaaggacagagctgggaaagagttgtcatgggcatggggactatgtgaggtcatacgcagttcctgggtcacagaggtgacccacgaatggtagctgcagcgttgattgttgcccctactattactgtgttattactgatctcagcccttctcttaagtgaccccttcactagtctcatagatgagcggccagcctgcctcctggatcccagaatttgctcactgtccacgacttcctgtcatggctgggaacattcaggcaggatctggtcccactcgtaggaggggaagacaaagagtgccatccctccaggccctcccctcctgcaggacagatcatcctgcctcactccatctgcagatgctggcaaagcacattccagccctcgcctctgaggcagagaaacagattccaattaagggacttgcggaaagtggcttcattttacaagcaattgggttgtgaattgaagcgggcattaaagtttacaagctaggctggcggaggagccagaaggccttgctgccactgcctgtcaggagacatcttctccagttactcaacaattgtgtggagtgagtgaggagtcggcacgaatcctgccctccatggctgatggtggaagaaatgtccattcattcgtcttcttaaaaccaaggatcaggctgctggagggcacaggatcatctctctcctgataggctttccccttctctagccttatgtgagaatctgggggattttaggtggtggtgagaaaatggggaaagaaatcacattcgttgacctctgcttacagctgggatccccacgcagctgagaaatttccaggaaattacctgggttcaatggaggaacttaacacttcaagctgtcacctggtgggaaagggtggtggcaagaagtaacaagatctcccaaatggatccaaccagagagaaggcctcctcatttccttctcagccaagcccacgggggccctggaagacagaggttgccggggcatccagggtctacacgggctgagctccccagacctggtgcaagggggccaggcattcccgccaaggctctgccacctacccagcaggacccatgagctcagcacctttctggacttgaggagatgggtctggttttggccttttccctccagacttccttctgtctctgcctctccactgacacctgcctctgctgtcccccaggacattccactctcttctctaaggctcaggcctgaggggttgctggtgggcagattccatctcatggttgagctgtttggcctcaatggcattttatctctctctctctctgtgtctctctctttctctttttttttttttcacattgagccatcttcttacagctgaggttttcatataaaaaagcaagttgctggtttctctttaaaagtagggcaatctggcagttctgggcttgtgtaaaaacaattcggtagagctaaaaacaggggcttctgataaagcctgagctcccagcagccaaaggacttatcaccccacaaaaaaatcccttcctgcactcatttatatcaacccctgcccctgcagacacgtattgtaggttttaactagaaacaagaggattagctttatttaaacagcaaaactgcttaaatgagataatatatgtattgggaatggtgcctggcacctaacctaatccttagttaattaatatttattgagcaaatcatcttgattattaaaaagacaggccagctggacacaataagaatgctagctcagagctggcacttgagggttcggtagaatattcatggcttggaggtgggggctatgatacgagcccatataatcagagaagttcagatgggaaatgagaaccacttggtagcctaaattcagagaaactaaagccagcctaacgctctgaagctggcaagtgttcatttttggaaatcagaaagtgatgatgtgttatcccaagagactcctgggacaagatgcagtgagcagccattcacaaagactaccttgaaccgggctctttccctacattttgttattatatcctcgctacaaccttctgaggtggaaattaatatccccattttacagatgcataaactgtctagtgagggtgacagatagtattgacatgaccagaagaataaatataaatgagataaattctctctgaaggaaaggaatagggatttacaatggtgtaaaacaaaggaagtggggcctggtctaagcgatcagggaatgtctctttaaagaagtgacatttaagctgaggtctaaaggattagatgagtgttaaataggaggagactgggcaggagggaaatcttctccatggctctcaatccagacacacaatttgaaccacctgaggttcacaaacacaaagaaagtatcgtgacctgatacagtcccagtctaattaaatcagtagaacccaggtgccgatgtttttgtttctttttattttatttattactattttttgagatggagtctcgctctgtcacccaggctggagtacagtggcacaatcttggctcactgcaacccctgcctcctgggttcgggcgattctcctgcctcagtctcctgagtagctgggattacaggcgcccaacatcacacctggctaattattctatttttagtagagatgggatttcaccatgttggtcaggctggtctcggacccctgacctcagatgatccgcccgcctcggcaccccaaagtgctgggattataggcatgagccactgtacctggctggtaccaatgtttttaaaagctttatggttgaaccactgaaatgaaacaaaaagtaaatccaaagctcatatactctagccaaacaatagccattaatagctattaagtaaatagaggagatgctcagtgataatgagcaggtagatcatcagcatccttgtcatcaccactacatctgcctcctccagatcatttggtagccaagtccaatgtcaaaggaataaaggaaatctgcctctgttgagggcttgctgtatgtcacgcactatgctaaattcttcactgtttcatttaacgtttaccgaaacccttattattttacaaatgaggacgttgaggctcagaacaaggcaccaatttacccaggatttcacagctcatcggggcagtgggggaccctcttccaggcccacctggctgtagagaccacactctttcctgtctccatgcagaggggcctcctgctcactttagctcccatttcccagcctgactgccttgattgggccgcatttctttgttctgacctcaaaaagagttttgtagatttgtgcccacttttctcatcacgcttaagaaaagtgaccaaagctgaaccaagctatctaggttcaaatgctgcttactggctatcgggccccaaactatctgtggaacttctttgagcctcaattttttgttttctataacatgggaataatatcagtacctccctcataagtttcttatgaagattaagtatgtatgtgttaagattcatattaagtgagaattacgcatgtacgcatatacatacaagattaagtatgtatgtaagcatatatatatacacacacatttagaatagagcatgaaatatagccagtgttcagttaatgtcaagtattgttaatattatcctatgggctggagtgagaggcctcctggggtgtttgctttccagcccccaatcgggtggcatcctggatagggtatcatcatacctctccccaggagatcaggatagggaattgtaagagcactcaggttggaggtaggatgtgcaccagggaagctcaggcaggaagctgctgtctttcctggtctctgcagactaggagcagcagccagggacctgggttgactgggggacgggtcggtgggtggggtgagatgactatcacacctcctctaaaaacaagatggggcctggtgcgctggctcatgtctgtaatcccagcactttgggaggccgaggcggatggatcagttgaggtcaggagtttgagaccagcctggtcaacatggtgaaaccccatctctacttaaaatacaaaaatcagccgggcgtggtggcacgagcctgtaatcccagctactcgggaggctgaggcaggagaatcacttgaacccaggaaggggaggttgcagtgagccaaggtcgtgccactgaactccagcctgggcgacagagcgagactccatctcaatccatctatcagtaaaatacaggatggaagggaacgcccagctctcagtcagctgccagcccacggccttggacgccactgatgtgagcctgtctgggctggggcagaaggggccagcgtcaggtcctcagacaatttcctcctggtagcctggcctgaggcccacccaacccagggagccggccctggccagttgcagccagtaccacctggtgcccagcagagggcagcacaggccacaggctggctttttctaggtgaaattttgctacaacgtgtagcctcttgggttcggtgtctcccctgtacttctttgcaggccggagaagtcccggacattatcacagacaccctgcctcatccccagcttctgaggtctttctggactctgttagcatatttcagaggttcactgcaaaccagaaacgggactttgagcttgtgttccagggcagagggccccagcgcctgtaggtgcagacagcgcacccccaacacccccgagtttccgcctcctcatctggagagcggggctggacaggatggtttttggggcttttttgcaagctcaccggggccaagtgagctatttccccttgccattctctcccaggaggagaaggcataagatgatgctgaaggcacaggctctggaagaggacagggccatgcttattcctgccttgttatgtgattatggacaagccttcactgacccttggagtgatggataaaatccgtaccccacagggttacaggagaagtaagtgagggaccacgtgcacggagcccagcaaggtgctcaggaaacaatgctattgtttttcaggttacatcttggggagaccacccagaggaccttctttcaaggacaggtacctggaatttctctccctttcctacatcatcttcttgttttcatgcgcagggaggccaccactacctgagccagaccactcccttcttaagccagggcctgcaaattgctgcagcactgccccctcgatctcaatcagacacccacattcctgcccaccatgcccaaagcccttcattgaccaagaccctggcctcgtcccaatcctctgtaaagtacacatgcgtcttcaatccaccctacaggactgtggagccgagaagatgtggggctgagcatttacctttccataagttctccagggggttctgaggcccacagaatcaaagagccactgctctaggcaatgagatagtattctaaaacaattaatgaaggcccatgatggggacaggagagccattatgcaaattccggccattcgaggttattaatttgcaggagagactgtagacgctgggtaaagaatgcccacaatattaggcagtcaggaggctaccctgcagggcctgttcctgctccgcctggtgagcagaaaggtctcagggaccagctttaaaggatgacaggcctcccactgggtcacagggcacagctgccaggactgaggccagaatgaaggcgatcgcccatccggctcagtggttctcagtcttgggtcagcactggaatccccaggagggaacacggaaaccccgagagctggctccgcccctagagctgacctcagtaaatctgagatgaggccagagaaattgcatttcgacaagttcccaggtgttgcagcgcaggtgtgtgcatgcatgcatgcatgtgtacttgtgtctgtgcccgtgcatgtgtgtgttcccctgttttctgctttctgcagtgttttagctcagacttcctgattggggtcccattcttgaccagaggcccagtctagacctagaagaatactaatacatgcccagctgtttagagcccacaagccctctcatggcccttgtttccaggccccataacagccccataagtttgttttaaaagtgcatctgtaggggagaaaagatttctttcctcatccatcactaggttcatggctgaggcacctgtaacaaaagacagactcacaagagaaaagcaaccaagtaatttaagttttgtgtgacatgggagccttgagaaatgaagacccaaagaaacagggacatctatgtgattttttgccaagtttgatgaagaagcagataattgtggagaagtataatcggaaaatgggggtatgatttgatggtaatgacctaagtggcatttggaaggcctgtttcttcagattcttctctgcgtctctgcatcttcatagagaaggactttccttccctgtgggtctagggaaggcacctcttaaatgaaggtttcatgacccacttgagaataaattcaggaaattcttttatggcctgcttcaggggagaagggcaggagaaggtcagagagcgaccttccttcttctgtggttttctcaaatgccaaggtggcagatctgggacagtgtgtcctgaactccctcacaaccatggctgtctgcaggccagtcactcaacggccatgaatgtgtattgacttgtgagatcctccaaacaaaccttcaaatctctgctcacccccatttgagagaccagagatgagccaagagacatgaagcaaccttcccaagggagcagagccaagatttgaaccagggctgttgggccagtgagcaagggcttgaaatccagtgcagcacaggtatcttcctcagcaggctcagagacaggaggtggaccggccggagcagaacggaccctccccttcaaagcgggactctgcccttgagccctgagcagccactctggacagggtccacagaggaaggcaatcctccagcccgccatgcttcctctgacctcttccctctctcagatggaactgcaagaagatcccaaaccatccaggtttcccctacctctgggcctttgcacagccttcagagcagccctgaggtgatctcctgggccatcagcacatgaccgaacaaaccttgggccaccaagctccttccccggagttggctctgaggccaatcccccgatttcacaccattttaccattcctagccttggtccctccacagagccccctgtttgctccccgctgtgcttcctggcaccagcctcagtatttccagaaacacatgcagagactcaaggcttggaggactggctttatcgagaggctctggaaggctctctgaccccagtggaatttggctctctccgtccctccagatgttactcaggccccaaaccttgcccagccttgttagtggcttctccttcccacacaggctgtgccaccccttctccctcagcctggaccccagaccagtactgagcttttcctgtcagccccttgggtcactgcagacaaggctctagtgttcaaactctggcttgagctcagagcagggcccactctgggcttgaaaatacctcgtgtggggacagcagggcacactggagaggtgaggagggtctcctgtcctaggctgaggagctggcccagaggcagccctggcctcctcgccactcccctgaaatcaattcctcatctgagggagctttctaaaataaaatttaaaaattgcccacggacctgcccagcttaaagcctttgcaaggctgctcttgaccccagcatgaaacccaagctcctctccatcctggctgccaaggccccaagccactcgcccagcccaccagcctcaccacactcccatagacttccccactcttgggtgggggtgggagggctacacgaagctctaaagtcagcccgtgctctttctcacccccaagccattgcacagcctgctcccttggtctagaacactccctgtatctgacttcgacatgtttcttcctccaggaagccctccctgatgccccattccccctccaaggactgcccagcatctggagcaccctgtaccgagcggcacactgtggtgctggaaacatccttgttgtactcctctgtgcctggacactgcatgtgggcctgtccatacgccacccagacccctcgggtacctttcaccatttctgagcactcttcccctggcttctgtgtgtttttgcttctaagaatctgttgggaagaaaatattccctctctatcaacttagatcctagtggtagggtggagggctacaaatcaactgacaatggacagattcacaggagaaaaaaacaatcagttgtactcacatgcctggggaagactgaacagctgggaataagggcttctatacccacttaataaaccgggtgaactgaatggggttagggctgctgtggaggcccaggaatcaatcagaagccttcagctttcacctcccatcccccgttccctgaccccatgccaccagatgcaaataagaaggaaactttaattccacaaattgaagcatttatgaagctcagcaggcaacctggcaggcaggcaggcacaagtgaggaacaagggccccgggctgggctgccttccaggcaggtcccctcgacacaggccactgcagctctctcctgcaatgtgtcaggagagcctggcacaatgtgggggacgggggcgggggggtgcggagcttggcaccacctggtggtctcagctgccactccacacgtaggaggctggatgcctgctggggcagaaggcggaatccagcctgaccacttagtggggctcatctacgcaagccttgggagcagtggcaggctgctgtgaggggcgcgctagcctgaggaaccctcagcctcagtactcctgggtcgagctgcaggagcaggcctggcaagtccctaaggcttccagcaacattccccttccccaggcttggcagtgccagcccacaactcagtcatgggacaccaggtgggctcctttcttgtgggcctggggcagtctgctgagaagaagtgggcttgcagccttgagggggattagatcctggaggagaggcccatcccttccttcatacaaccggggtatggctggctgtccacaggcggccatccccgtgccacaggctgagttctgtcttccccaaactcacgtgctgaaggcaggaccttgcaatgggactgttcttggagacagggcctttaaaggggtaactacattaaagtgaggtcattaggttgggccctcatcccatgtgacttgtatcttcatgcgaagagaataagacatagacacacacacaaaggtaagaccacgtgaagacacggagaaggcggcgtctgcaaaccaaggagagaggcctcaggggaaaccaacctgctgacaccttcatctcagacttccgggctccagcactggaagaaaatgaatttttgtttaagccgcccagtctgtggcaccttattatatcagcctgagcaaaccaatacacaagggcccagatacctaaacagaaaagtgtgataaggccatttaaaccacaaatacacagcgggggtcccagatcccagagcagggtctcagttatttcacagatcacaaaactgaggatgctgaggaagggggcctccccaaggccacacaacaacttggaggaaacacggaactgaaggaaattgattcccaggggagggcccttgcctgaccccctcctaggggagagtcagagggtttccaggagcatgaggatgctgagactacaggactacagatggagggtgtttcatggctgagtgaaggggtagaagccaggcgagtatgacacaggatccctcttgacagaattagaacacagagatctggagttcccatcatgcccctaccacagattcatggtggaaacttgggcctcatctgcttatctctgaagtgcagaaatttatagcacctacctccagggagagttgggggttaactgagatcacgatgtacaaacctgtaagctgtaaggcaatggaaaagtggagggtatgtccttggatgaagcttccgctctggacagcatggaggacccaggagtcaggctgggctgctggctcacaggtgttctctccccctggcccaatgccctggttcccattgccgtctgagctcctcccttccatgtctctgttcttgcttccttccctcggtctgccgtcgccctttgtcagtgatcagacgtgaccatgggtaacaggcatgaattttagtctctgcatgctcaggtgtgtaagaaacatggcttcctttagttcctataactaaactttattttcagtttgcactgatcttcctccagctgccctcccagcccagcagggcctctgccctggcagggatgggatcagaactcaaagcccctttcatgcaaccgtgtgtgcacagttacacacagatctgtctaaaatctaactagtaggaagcagtgagaacttggtgctttgtagagaggctttgtgattcagataacagggctagctccagggagtgtggaacaaacgagacccctgagggcacagacacctcagagcatttgtacctctggtgctggggaggggtggggggcccatctgtgagcctctggtgcccatgtgcccacgtgcagggtttgtatctttgtgcactttgtacctctgtgtggcaggcgatcaatggtgtttctatctcagccagggactcaggtgcgagactgagaagcccaggaggcaagaggcacctgcagccctagagcccactgcagattttccttgagggccgtatatccagaaccatcccagggcttggcttttgagagaaaatgtagtcttaaagaatgaacaagtgggccgggcgccgtggctcacgcctgtaatcccagcactttgggaggtcacgaggtcagaagatggagaccatcctggccaacacagtgaagccccgtctgtactaaaaatacaaaaaaactagctgggcatggtggcgggcacctgtagtcctagctactcgggaggctgaggcaggagaatggcgtgaacccaggaggccgagcttgcagtgagccaagatcgtgccactgcactccagcctgggtgacagagcgagactccatctcaaaaaaaaaaaaaaaaaaaaaaaagaatgaacaactgctgactactgtttactacaataagcatagctgatactctatccaggaagaggaagccaccactcagtgccccagccaagattgttctcaagcttttgtccgtcccaaacctttatgaagcatcctcacccactgacatgtgcagtacttaagacggtgcaccctggagtcaaatcccagcttggccccacatgagctctgaggcccttgaggagacagcgttgcaaagaccccaggggccgagtaagcagaggcctttcagagatcagagaaaaggccacatagctgggagcctttgtgaaactggagaggtcatcggggccagatcctcaggggcccagtggccctggaaaggaatctggtcttgtacctagaaatggtggcattaattatgtgactttgtccaagtcgctgtcctattctgagcttcagttttcttgtctgcaaagggctctggaccaaaccatctaggatccaccctgaccctgggccttcatgtcaggttaaggagagacagggcctcgttctgcgttcaggatgagtttctccagggaaaggccttctagctccgccctgccctgtctggctctggggaccacgcaggactctcaagacactaggtcactacactcaggagtttcccatttctgccaagacaatctggagaagacatcaccccacttgagtcatgagatgtcctcaacagcaccttctagagtgcagatctttttgctgctgtgagagaggggcttatgcagaatgatattgtcagtgtagacatgtttcacacagaggagaactcaggacaggggacaggaatggaggcaggaactcgatctattagaacaagttttctgatgtggttatgcatcagggatgtagaatcctgtgccttcaggatttctgggattaaagacaatcccagaaaacaggcctggacaggtcctggaatcagccccaggcctatttggataggggattctggggtcctcgtacccagagcctggtctagacagaaggagggagtgggctctgggtgggcaaacccaccttggccctttcccttccctcatcctgtggggaggggctcagctagtggagggtcagagagggtctaaagcaggggttccatggtaggcacccctcttgtccagacccaaaggtggcttggatcaccaccgaggcacagctgagtgataagttgatgagcagctgtgttttgctgccacataaaaatggctcattccccaccccccggccctgaagtgactatttactgagagaggcaaccctactgaacaaaagcctgctatttattacacgttcggtgaacaccccacagttccaatgcatggggagggcttggaaaccaaatcaaccttgggaaaaggaggtgcagaggccaaggtcaaaaccaattcatggaagtgggaagaaagcagggctggcctcaaccttttcactattagagagatggccatgtaaagtagtgagcctcctgtggaaggcatatgcaagaacaggtagaatgattatttcttaggggttttgtagaaaggattccttacacacaaaggcacaggattctacatccctggagcataactacatcagaaaacttgttgtaatagattgagttcctgccaccactcctgtcctcgtcctgagttctcctctgtgtgaaacatgtctagactgacaatgtcattctgcataagcccctctttcacagcagcaaaaagatctgcaccctagaaggtgctgttgaggacatctcatgatgcaaatgaagcagctgcttgcaggagccatggaggggcttgggcagcaggcggggggtgcccacaggcatgtgcccctccagaaatgggcaggaagtggaaggaagagaaagggagtcaggcccagggcaggggtgggggctggggtctgctttctccacactgccaggttctggtgaggacctcccaggtgggtgtaaatttgcaaacccaaatggttaagaagatatatctgttaatgtagaacattttgtatttaaccagtaattgacttgattcataactttaagtatgcagatgtggtaagtggacctcagtattagcttcctattgccactggaacaaatgaccagaaacttcgtggcttcaaacaacacacctttattatctgacatttctgggggtcagaaatccaaaatgactctccctgggctggatccgggtgttggcagagctgcgttccttctggggtcctgggggaagcctgtttccttgccttttccagtgtctagaggctgaccccattctttggctcatggcctcttcctccgtcttcaaagccagcagtgttgggccgagtctttctcaggctgctacctctgttctctctctcgtgcctccctatgtcatttgtcaagacccagaggattccacaggcctacccagataacccggggtaatcttcccactttaaagccagctgattgacaaccttaatcccatccacaacctctgtgaccctctgccatgcaaggtaacatactcacaggcatagggatgaggatgcggatgtctttagagggccactgttttgcctaccacagcttccatttggattcttgtcccaacccctacaaaagtgaggcatataatttgttgaattctgaataaaatgctaccagtgtctacaaattatattttttctttttttaaaaaaaaaaaaaaaccttcttccccaagtctggtttcctttagacctcaggactaagtacctgagaagatctgcgggcaaggatagttatgtgattatctggacagaatggcatttctgattgacattgttgcattactttggctccagatgcagtggcctgagagcagaaataaaaccccctccagctgcctcagcccaccctttgcagagggagaattgagttggggccacacggtgggaagcactaatcctcagtccacacaaaccctcgctttccaattattttgatggaagtcatgaaagagcactcagctaggcattattaatccattttttcaattcagcaagtattgattgagcagctaccctgtgccagtgaggttggaaacacaagggtgatgaacaaggtacatgtgcctggccgtcactggccagctctgtcactgcaggcgggaactttccttcctgtggggcccagggttttataatcacatgagcacctacacatccggtacagagccccgttaagggggcagggcctggcctgcctccttcactgttgtctccaattgcctcagatgcatgtggatgctcattcgttgaatgaatgaatgaatagatggtccttgctgatcggagagtcaatgactgtatcaggccaactggaaaagcagagggcaagccaagagaagacttggacagtgcctgccaccatggctgcgagtgagaggactgcggatcccgaggtggattcctggggtggcagctactgtttacaaagcactttgctggtatttattaggccacgcagttcccttccaagtttcctcctgttatcattctcactttgcaaatgaagaaactgaggtactgggataaaacttgctgaagaccacatggctagtaagtgtcagagcttggatgtgaacctgaatgctcgctgaggagagagcagctcgcctccttccctcacaggcacatagtcagccttcccgaatttcatccggcaacaattaacctctcccttctcactatcccccgctccctttccatctgtagagatctccttggatctaaattatcagggcctaaagccaggccatactaccgaggttaaagaaggtgaaagggctgcattgggcaacattgttccttcaatcctaactctttaatcctaattcatcactgcacactctgctcccttccctgggtgaagacagtttgatttgcccagtatccagaaagtttgtgctaagacaagggaaattgccacatggctctctgtttcattcagtccttcataagcatgcagcctgacctggagaaactgacagtgtaaaatgcatggagcagctcctgtccctctctttcctacccttgagcactctctaagcagtagctggccgatacagtcgcccaggaagtctccctgtagctcggccgtcagtcattaccctcactggcagcacgggacagagaacgggatatgttctccccttttattttgtgtggtgagacttggaaaactctgcgcctagaaaaatccatttctgaaggttgctgctattgagtagtgcagtgagactgggtttgaaggtattggactcttacataggctatgtgaacgtgggcaaattgcatcttctctttgagaagtctgagctcaagtcttgctttgagttatttgtgtactaacctttgaccttgctgacaaaaaaaaaaaaaatcacagtgctgggtacagctcctgacactccacctcccctacttcttttttagatacagggtcttgctctgttgcccaggctaaagtacattggtgcaatcatagctcactgcagccttgaacttctgcctcaaacaatcctcccacctcagcctcacgagtaggtgggactacaggtgtactagtatgcccagctatttttatttatttattttgctgtccatcctgatctggaactcctgggctcaagcaatcctcctgcctcggcctcccaaaatgctgggattacaggcatgaggcactgcacccagcctcaacttctcccacttctatcttctccccagttctaggtgaggcaggacctgccacatgtccaaatctccatctgtccccagcactctactaaatggcttaactgggccctcacgtccctccctggggatcctgtgaaaagacttgtgaacctgctccaggtcctgactgaaccaaatttcctctctctacatgccgaaagagtaataggtgttcctgcattaagcaatggcttaatttaggtttattttcattcttcagatatctctcccatttgatgtttcacccccttgaagctcaggtgaatctccatcttcttattcatctgaatattcctcatgcctggcatcacgcctcactcatagagtaggaattcaaaaacatcccagtaggagctgggaaagctcctactgcatgtcttgtacatctgctgtatgccagctgggaaagctcctactgcaagagagaggcaaaccacaaaggggactaaggggaagaattgggaggggggcatttattgccccaaatgactgaatttgggtcaaataacaggaccacgggcactcacatgttcaagttatgttcaggaatcttcctgttttctttatgaagcagaccctacctctcatcataaagctggaaatgccacgttccctccattccagcctctcttgcagctatggtgagcctaaatgagctagactcagtcaatcaaacccttctgccctagagtttgaatgggaagttctgacttgaagaattaggaaccacacaggaccccgtttgtgaagggggtggcacaaggtgcgtggcctctagctcccaggggcagcatccagaattcagcctcagggatgttggtcatgcaagccaccaaatcagtgccagcagccaagacgggggtgtcttcacagggccagtttcgtcatgttatttcaagggttgctcctggcccgtagcctctgaatttattttagtttctcagagatttcagtgggccaacgaatgtcacttaatcgatcccttttctgcttggaggagccagactccgtgtttgttgcttacaaatgagaccttgactgagacaagttgtcttgagtttccagttgaagtcatcctattccctttcaccttgaggcctttgcacatgtcatttctctcacctggagcaggcattcaccctctttttgtgactggatgactcctacccagtcatccaagggtcaggcttgaagactcttcccctgagaagccctcccagatcaccccaaatctgggctcccacaccaccctgcatgttcctcttagtagcatcctgaccctggattttactgtttatttctgtgtttcctcactattctgtgagctgcatgaggacagaagtgcatctatttcatcattgttagtagtagttagtatagttgcccagcctattgatattgttgaatgagtggatggattgaactctcttaggccagagtgatcccccactatcactgcctggcagcatggagcagcttcagtttttggactcagggcaattgccctgttccaggaaaccccaaaatagagttgcctcatttcacttctaccagcatgtcttgtacatctgctgtacgccaggccccgtgtcctcttacgcccacatcccagatcctgcaggtagaagtgctcacattgctgtgctcccttttctctgaccagccatggaggccctgggggcttggaggagtggctgcttactccctgggggaagtgtgggctgcaagccccttgagtgggcaggttgccatggtgatgctaatggagagacttgcctgaggaatactgaccaccaaaaggaacaattaccagagaaggcccatttctttagcaattttcaagaatgggcaagataaaaagccacaagtgaaaaggcattgcaaacaaataatagtgtatgagctggtctggacccaacaaggcctgtttcccacccctctttccctctggttgtagtgaataaagccatacttttcagtgatttataactgttcaaaaatgactcgtttccatatcttctttcatctacccagcacccattatgtaccaaatgcctaacagacacttaaaatatactctataattatgaaaacaaccctacaaggtaattgttcccgtattacagatgagaacactgaggctcagggagtgtaagggacccgtctagggctacgcagctgggaagcacatgcagcactctacttcatgcttaattcaaggaagcgaattctccttgtgggttaacatcatcacagtggcaattccagtgcctccataagaaagtgtccttggaaatgagacactagccctctcctgtctcatctgcacaatatcctattgccatctatttagaagagaggtagtgagttggttcattcattcattctccatttgttcattcatacacatttattacactcaaacttctagggcaaaaccagcaagccccgtactggacacttcagactcaaagatagcaacttgctaagttacaggagcttcctcataattgctgagcttctaagctctttgtcccaactcctgaaaagtagccctcaacttccaaactgtgcttcgggcactgacattccctgagctccacacacccttggaccacagttttctgaggcccagatgagcacaatgtgcagggcagagcctggcacttccagggctccaaggagtccagaggaaaatcgggcaggtcctgaatcaggctgctgtaggttgaactcctgccccacttagcagctggatgatgtgcaaattgctcagcctctctgtgcttcagtttcctcacctataacctagggctaaaaattagaagcacctactccatacagctattgtgctgatacaatacaataatccacataaggaacttagaacagaacagtgccggcggtgtatgttaaatgctgagtggacaccagttgggattagaagtagcagcattgccaggtactcctgagcaatgggtcagctaattccactctaccctcagaccccaccctcctttgcagttccttctcctgctttgataactagaagcagtcatatagggcctggggtctctacttgtaggagttcagtcagggtggtaggaaaaattataaaaattatagaaagactcaaaccttcttggaaggccgggaggttttgcaaaagttttgggaaaggatttggctgaaggcagctgaattttctcagagtaaataacaaggaagtgtaagggaattaatctagataagttagtttacttaggccttgaaacatggcctttaatcatccatgctcaggactgctctcttgggggaaaggatcgcccgaccccccaccccaccctcaccccaccccctgccaccatgttaattacccacaagtgtgttgactcaaagcctttgtcattaaatctgtactgaatatatgcccacagcaccagcttgtcaaggctgcagctgctgactctttacagcaccctcctcggtgcctgtgagtggcccagtcccttagccgtgcagccaggcaaaaaatctgtgtctgcatacattttttcatccatcactcagccagggtctgcgggttggaccccgcatctactcacaaatcaagatgttcagttccgccacccacccctgtctgtcttcctttctcacagtcactctgtaggtgtatcctgaaaatgtaaatcagaccacagcattccctagctgaaaacccttccgtggctccctattactcaccataggctaaattccgcccagactcctctgaagggcttgcaaggcctcctgtgttctagctcctgcctgctatccacccacacccctcattcctgcccctgtaaaccccttgtagctctcacatctcaagaattaaagatttgacccagttgctccgaccacctccgccccgatccccagaaacagtttcccccttctctttctctggccaacttctatcggttttcagaatgtctcccctggccacgcaggatcccttccattttgaggctgataaaatcctgcggatcgcaagctgagcgctcatcacaccccatcgtgattatctcccctgcaaggccaggggctttgagagggtgggactgtggctgacacgttcagtgctccagtcccatcacctgacacttgccatagagaaggtgcttagtatttagaagagtgtgtgcgattaccgagagcatggatatgaagaaggggatcacaaccttgaaaaagtttgttgctgagaaagaggcaagcagccccaactgacgggagctggcctggtcctcacagtttgtctcctgttgaacaatttcacagaacattgacatcagacaaggctattctgactgtgttggagcaagacaaaatcgagagcacttcgtagtcatgtctaaacgcagataaaacaagaacattgtctaaaccacaaaaatgaccagacatcccgcttttttgggctaatgggagtaactgtttaccaatgtttataatgttggccctgcactagtccttctaccttatagataagattataggtacccaattatagaatgattcctactgcctgatggcatccaattgaaccctccctagtcacttaacacaagcccccatccttttgtaagttcttcgtaacaccctctcacaaagacccctcactgttccccacagtgcacaatctccttgctgcaatgagccaataaacccagctccgttcaactgcaggtgtgttcctggtctttggctaaagggcattgacaccacccatttcccagaaacctgaacttgcaaaaaaaaaaaaatacctaattaaacaatttctgcaagctaattgatagtgagaaatgtatttctgatagggagcatcagctggagtagacaactttgtacatactatatgttttccggacagttgcttcagcttctcctgcattgtgtgtgtgtgtgtgtgtgtgtgtgtgtgtgtgtgtgtgtgtgtgtttgcagggggaagatgcaagctttgctgtcctgggtgtccgtgactgggcatgtctcatctggaaagagatcagctaatattccttgagaaaaagaatgttatcactggatgattacatctgcttccagagaggtaagagcatgcagcatggagcagacactctctatcccaggagctgccctgcccaggcctgggctggtggctattgtcatggagtggtaactgtaaggccatcctcataagtcctgctgatatcactccaatccatggacacccctgtgactccgtctccattcctcaggcctgcttcccatggaaagacccagagggaaacgtggttggtggcattggggactgagaacagaacaaaattcaggctttgagtgtggattagagacgcactgtgtggtgcttgcatcacctctgacagtggttgggtaatgggctgaatcacccaatggagacagaatgccaacagatgttagttgaggaggatgattaatctccttcttcgaaaactcagagaatctttattggcaacgttgaagtcaagatagggcttctccttagcaaccggaaagcgcctagtgtgcatggctacagaattcaatatgaaactcagatgatgaaggtagccatgggcacctctgattgcccattgtaaatttctgcctggaatgagggctggggcctcataaatgtcaacaaaagctggtgatgggtccagagagggatgttaggccagccttgatggatgaggaagtttcatttaggggctcctgtcacttcccatcttcaggccaagctgacatccatggctgtaaaattgtcacccttctcctttgcctctcaggaaagcaaaacttctttacgacacttttaatcaaatctgtcttttgccacttctctccccaccctgctccctctgcctttatcctgacaaagaagcgaactgttactctctgtcagttatttgtctgagtaatttcttgatgaaattgcaactataattgaattttctgaaaaccaggaattcaaatgaggcgacaacagaggaaacagcgtgattaaggaattgttattcactcgttgtacatcattaccacccagaattcatcgctggatcgttcacagatggagttgctgaactatgattatattttagaaaatgaagggggaaaaatctaaaaaggcaataaaacatattagaagccttcttgaggaacaggattattactgattaagtatattttgcatgaaaaatgtgctagcactttggcagtttaaattatacgtccgtgcagtcaacatttttgctggtctcaaaattctttgttagtttggtcttctaatcacattcctcttcaccctccaaattgacgacttgaaagaacattagaaatgatcattcctgaaggagcatttgctctcaaaatgcatttacgctcagcagccattaaaaggatatcatccagtcacttagtttctcaatttaactttaaaggaaagttgccttattagagaagtggcctctatttcaatgtaatggtctttgtcacatcttccaatgtgctggcttagtgctgaaggatggggaaaggcagttttcacatattgcagccaccataccaccaaagaaaacaggtgcacttccaggcatcatttagcggggtaccacattcctggttccagtttcctttttagaaaatctgaaagtaactttggggcatatcttttaaggagtactccaacacgactagtggacagaccctaaattaattgccaatcagctctgccttctggtatttacacctttatgtaataacctccacttgaaggtagatgagatctgtgacttgcttctaaccagtggaatatggcggaggtggtgggacgttactcctgtgattacattacatcatgtggctcctttatgatggaagattcatgctagagattctccttgctgacttgacaaagtatgtaaccatgatgaagacttccacgtggcaaggagctgtgggaagcccaggtgctgagactggcatccagcaaacacccagcaagaaacagacgtccttggttctacacatacaggaaatgaattctgccaacatcctgagtaaggctggaactagattctccccaagttgagcctgacaagtaaaatacagaccagccaacaccttgattgcagtcttgtgagacctggggaaaaggacacagctgaaccgtgtccattcttctgacccacagaaactgtcacatcataaaggtatgttagttgttacacagtttagaaaactattacagctgctcaagaaggttagctagctccagatttcaatccattcacaggaaagcaagctttattcctagaagaataattcatgctttgcaaaaagaggaaaacgtcctgcagttttagaaggtcttttctttctcaacacacccaaatttctttaaaatcctcaagaagtgcatttgttttcatggttgactcgaagaagtgagtataattaactcacaaaaggtgggaggaagggacaaattaaattttggtatgcatacaggtagcttcttccaagtgataatgagcaatgtgaaacaaagagattggcattaaatgtaatgaaggactagaggagtgtacctaaacctgaaacaaattccaagaagtggccttgacctaaaatgtttgcatcctgccagagacccttacttataagtcaggagatacctgatgcccaggagaactggtttttgtactctgtcttacacagactaagaattaagaatgcaggtgagaagtttagaaaacttcctgatgatcatatgaaaagacattaaactttacctggtaaaactatgaaatgttgcctgtagatttctaagaaaaatgagtaggaagttggaaatatttcagaattaagaatgtttttatataattagaactctttaagctatgtaattctgaaatctgtgtgacagacttctgtgtaaacataaagaactagttatttttacagattatctagtctgtgtattcatttgatgtttctattacttttaccctcactacaaagttcaatgaaggttaaaaaaatattgttcttaaaaaaagaagagataaacctggagtagctatttcaatgttagacaaaatggattttaaaacaaaaatgttaatacagatagaaagggacattttataataataaaagtatcaaaatatcaggaagataccacaattataaacaaatatgctcctaaaaatagaatctcaaaatacataaaacaaaaactgacaaagttgaagggataaataaataggcagctcagcaatatttagaaacttcaatacctcactttcaataatggatagaacaactagacataagatcaacaagaaaatagaatattttaacaaagctatacaccaactaggcctaatggatatctatagaataatccacccaacaacagaagtcttcctcctcctacttctcctcctcctccccttccccttccccttccccttcttcttcttccttcttctctttctccttctccttcttcttcttcttcaacaggatcttactctgttgcccaggctagagtgcagtggtgtgatcatggctcactgcagcctcaacttcccaggctcaggtgatacatgggcctcagcttcccaaagtgctgggattataggcacaagccacatgcctggcccacatattcttcttaagtacacatcaaacattctgtagaatagaccatatgctaggccacaaaacaagcttcgataatttaaaaggactgaaattatacacaatctgttccttggccacaaagaataaaattagaaagaacttttggaaactcacaactatatagaaattaacatacccataagtaaccaattggttgaagaagaaatcacaaaataaatgagaaaatactttgagatgaatgaaaattaagacacaacatataaaaatttatgcaatatagctaaagcaatgcttagagggaaatttatagctccacatacctacattaaaaatggagaaagttacactgttggtgggactgtaaattagttcaaccactgtggaagacaatatggcgattcctcaaggatctagaaccagaaataccatttgacccagcaatcccattactgggtatacacccaaaggattataaatcattctactataaagacacatgcatacatatatttattgaggcactatttccaatggcaaagacttggaaccaacccaaatgcccatcaatgatagactggacaaagaaaatgtggcacatatacaccatggaatactatgcagccataaaaaagaatgagtttatgtcctttgcagggacatagatgaagctggaagccatcattctcagcaaactgacacaggaacagataaacaaacaccacatattctcactcataagtgggagttgaacaatgagtacacatggacacagggaggggaacatcacacaccggggcctgtcggagggtggggggcaagtggagggagagcattaggacaaatacctcatgcatatggggtttaaaacctagatgacaggttgataggtgcagcaaaccaccatggcacatgtatacctgtgtaacaaacctgcacattctgcacatgtatccccaaacttagagtaaaatttttttaaaaaaagaaaaaacatctcatatcaataagctagacttctatcttaagacgctaggggaaaagcagcaaactaatcctaaagcaagcagaaggaagacaataatgaaagtggaaattaatgaaattgaggacagaaaaacaatagagaatatcactgaaaccaaaaagtggttcttgttttctttctttctctttctttctttctctctctctctctttttctttctttctttctttctttcttgtttcttttgagacaaggtctagctctgtcactcaggctggagtgcagtggtgcaatcacagctcactgcagcctcgatctcctggacttaagtgatcctcctacctcagactctcgagtagctggaaccacaggagtgcaccaccatgtccagctaatgttttcaattttttgtagagatgaggtttccctatgttgcccaggctggtctcaaattcctaggctcaagcgatcctcctgcctcagcctctcaaaatgctgagccaccacacccagctggttatttcaaaagatgagcaaaagtgacaagcttttagctaaactgaccaagaaaaaaagaatacttaaattaccataatcaggaaagaatgagagaacattactaccaacctcatagatacaaaaagtatagaggaatacaacaagccaattgatatgccaacaaattaaattacaaatgaaatggacaaattcttagaaagacacaaactacaaaaactgactcaagtagaaatagaaaatctaaataggtatttaaaaaagattattaaactgagagctgaagacagggcagcaaaactgcaggggccaccaccaccaccaccacatgtcaggaagagtacggagaggccctggaggggcataacgactgcaggaataaattaggagagccaagagaacccacagaccctctgaaggaagtggattgctcctgcaggacctgggagacacctcaaatactgtgctggtatctgtggctgagaaacccacagatggtttgcatcacaggactctgtacagacaacccccagtaccagcctggaacctggtagacatcctgggtggctagatccagaagagagataacaatcactacagctcggctctcaggaagccacatccctaggaaaagggggagagtaatacatcaagggaacaccccatgggacaaaagaatctgaacaacagcctcgagccctaggccttccatctgacagacactacacaaatgaggaggaaccagaaacccaactctagtaatatgacaaaacaaggttccttaataccccccaaaaaatcacactaggtcaccagcaatggatgcaaaccaagaagaaatccctgtttcacctgaaaaagaattcagaaggttagttattaagctaatcaggaaggcaccagtgaaaggcaaagtccaacttaaggaaatcaaaaaaatgatacaacaggtgaagggagagattttcaatgaaatagatagcataaataaaaaacaatcaaaacttcaggaaacaatggacacagttatagaaatgcaaaaggctctggaaactctcagcaatagaattgaacacgctgaagaaagaacttcagagctcaaagacaaggttttagaatgaacccaatccaaaaaagacaaaggaaaaattataagaaaatatgaacaaagcctccaataagtctgggattatattaaatggccaaacctaagaataattggcattcctgaggaagaagagaaatctaaaagtttggaaaacatattcgggggaataatcaaggaaaactcccccagccttgctagagccctagacatccaaatacaagaggctcaaagaacacctgggaaattcattgcaaaaagatcattacttagacacattgtcatcaggttatctaaagttaagatgaaggaaagaatcttaagagctgtgaggcaaaagcaccaggtaatctataaagggaaacctatcagattaacagcagatttctcagccaaaaccctacaagctagaagggattggggccctatcttcagcctccttaaacaaaacaattatcagccaagaattttgtagccagtgaaactaagctttataaatgaaggaaagatacagtctttttcagataaacaaatgctgagagaattcaccactaccaagtcagcactacaagaactactaaaaggagctctaaaccttcaatcaaatcctggaaacacatcaaaacagaacgtctttaaggcataaatctcacagaaactataaaacaaaaatacaattaagacaacaacaaaaaacaaggtatacggacaacaaatagcatgaagaatgtaatggtacctcacacctcaatactaacattgaatgtaaatggcctacatgctccacttaaaagatacagaattgcagaatggctaagaattcaccaaccagctatctgctgccttcaagagactcacctaacacataaggacacaaataaacttaaggtaaaggggtggaaaagacattctatgcaaatggagtaactattcttatatcagacaaaacaaattttagagcaacagcagttaaaaaagacaaagagggacattatataatgataaaaggccttgaccaacaagaaaatatcacaatcctaaatatatatgcacctaacactgaagctcctaaatttataaaacaattactaatagacctaagaaatgagatagacggcaacacagtaacagagggggacttcaatactccactgacagcactagacaggtcatcaagacagaaagtcaacaaagaacaatggatttaaagtatatcctggaacaaatggacttaacagatatttatagaacattctatcaaacaactgtggaatatacattctattcaactgcatatggaactttctccaagatagaccatatgataggtcacaaaatgagccttgataaatttaagaaaattgaaattatatcaagcactctgttagaccacagtggaataaaactggaaattaaggccaaaaggactttctaaatcatgcaaatacatggaaattaaataacctgctcctgaatatcactgggtcaaaaatgaaatcaaaatgcaaatttaaaaattattcaaactgaatgacagtactgacacaacctatcaaaacctctgggatccagcaaaggggatgctaagaggaaagttcatagccctaaaggcctacattgaaaagtctgaaagagcacaaatagataatctaaagtcacacctcaaggaactagagaaacaagaacaaaccaaacccaaattcagcagaagaaaggaaataaccaagatcagagcagaactaaatgaaattgaaacaaaaaaattacaaaagataaatgaaacaaatagctgattctttgaaaagataaatacgattgatagaccattagcaagattaaccaagataggaagagagaaaatccaaataagctcaattagaaatgaaatgggagacattgcaactgaaaaccacagaaatacaagagaacattcaaggctactctgaacacctttatgtgcataaacttgaaaacctaaaggagatggataaattcctggatagatacaaccctccttgcttaaatcagggagaattcgataccatgaacagaccaataacaagcagtgagattgaaatggtaattaaaaaattaccaataaaaaagtccaggaccaggtggattcataccagaattctaccagacattcaaagaagaaatggtaccaatcctactgacactattccacaagatagagaaagaaggaaacctccctaaatcatcctaggaagccagtgtcatcctaataccaaaaccaggaaaggacacaaccaaaaaagaaaactacagaccaatatccctgatgaacatagatgcaaaaaatccttaacaaaatgctagctaaccgaatccaacaacatatcaaaaagataatccaccatgatcaagtgagtttaataccagggatgcagggagggtttaacatatgcaaagtcaataaatgtgatacaccacataaacataattaaaaacaaaaatcacaggatcatctcaatagatgcagaaaaagcattcaacaaaatccagcacgcttctatgattaaaactctcagcaaaattggcacacaagggacatacctcagtgtaataaaagtcatctatgacaaacccacagcctacataatactgagaactggaacaaagatgcccagtctcaccactcttcttcaacctagtaatggaagtcctagccagagcaataagacaagagaaagaaataaaaggcatccaaatcagtaaagaggaagtcaaactgtcactgtttgctgatgatattattgtttacctagaaaaacctaaagatgcctccagaaagctcctagaactgatcaaagaattcagcaaagttttgaatacaaaattaatgtacacaaatcagtagctcttctatccaccaactgcaaccaagctgagaatcaaatcaagaactcaacctcttttacaatagctgcaaaaaaaataaaataaaatacttaggaatatacctaaccaaggagatgaaagacctctacaaggaagactacaaaacactgctgaaagaaatcatagatgacacagacaaatggaaacacatccaatgctcatgtatgggtagattaaatattgtgaaaatgacaatactaccaaaagcaatctacaaattcagtgcaattccatcaaaatactactatcattcttcacagaattagaaaaaaacagtcttaaaattcacatggaagcaaaaaagagcccacatagccaaagcaagactaagcaaaaagaacaaatctggaggcatcacattacctgatttcaaactatactataaggccatagtcacccaaacagcatggtactggtataaaaataggcacatagggttgggtgcagtggctcacacctgtaatcccagcactttgggagaccgaggcaggcggatcacaaagtcaggagattgagaccatcctggctaacatggtaaaactccgtctctactaaaaatacaaaaaattagccaggtgtggtggcagacgcctgtactcccagctactcgggaggctgaggcaggagaatggcatgaacccgggaggcagagcttgcagtgagctgagatagagccactgcactccagcccgggcgacaaaacgagactccatctcaaaaaaaaaaaaaggcaaatagaccaatggaacagaagagagaacgcagaaataaacccgaacgcttacagcaaactgatctttgacaaagcaaacaaaaacatatagtggggaaaggacacctcattcaaggaatagtgctgggataattggcaagccacatgtaggagaatgaaactggatcctcatctctcaccttatacaaaaatcaactcaagatggatcaagggcttaaatctaagacctgaaactataaaaattctagaagataacattggaaaaccccttctagacattcgcttaggcaaggatttcataaccaagaaccaaaagcaaatgcaataaaaacaaagataaatagctgggacttaattaaactaaagagcttttgcacagcaaaatgaacagtcagcagagtaaacagacaacccagagagtgggagaaaatcttcacaatctatacatctgaccaaggactaatatccagaatctacaacaaactcaaacaaattagcaaaaaaaaaaaaaaaaaaaaactaccaaaaaaaatcatcaaaaattgggctaaggacatgaatagacaattctcaaaagaagatatacaaatggccaagaaaaatatgaaaaaatgttcaacatcactaatgatcagggaaatgaaaatcaaaaccacaatgtgataccacctcactcttgcaaggatggccataataaaaaaatcaaaaaataatagacactggcatggatgtggtgaacagggaacacttctacactgctggtgaaaatgtaaaactagtacaaccactatggaaaacagtgtggagattccttaaagtactaaaagtagaactaccatttgatccagcaatcccactactgggtgtctacccagaggaaaagaagtcattatacgaaaaagatacttgcacacacatatttacagcagcacaattcgcaattgtaaaaacgtggaaccagcccaaatgcacataaagcaacgagtggatatatatatatataaatggaatactactcagccaaaaaaaggaatgaattagtggcattcacagcaacctggatgagattggagactattattctaagtgaagtaactcagcaatggaaaatcaatcatcatatgttctcattcataagtgggagctaaactatgaggatgcaaaggcataagagtgacacagtggactttggggactcagggggagagggtggggagtggatgagggataaaagaccacaaatatggtgcagtatatactgctcgggtgatgggtgcaccaaaatctcacaaatcaccaccaaaggactcactcatgtaacaaaacatcacctgttccccaataacctatgaaaataaaaaaaataaaaataaaattttaaaactaccaaataacaaagaaattgaatttgtcattttaaaacttcccacaaagaacagcttaagcccagacagcttcactggtgaattatacagaatatttaaattaaagaattaatgtcaattcttcacaaagtcttctaaaatgtagaagaagaggggacattttccatttcattttgtgaggccagtattatcccattaccaaaccatacaaagccactacaaagaaaactacagaccaatactgcttatgaatataaacataaaaatcctcaacaaaatactagtaaactgaatccagcagtctgttaaaaagactaacaccatgaccaaataggatttatcaaaggaatgcaaagttggtttaacatttgaaaattaattaatataatacataattcaatagaaaagagaaaaaaacacatgatcatcttattagacacagaaaaatcatttaacaaaatccaaactgacgtcatgataaaaacactcaacaaactagaaatagagtggaactttctcaatgtgataaaggacatctaccaaaaatccacagctaatatgataaataatggtaaaagactgaatgtttttcctctaagatcaggaaaaatacaaggatgtctgctctcagcacttttattaaatattgtactggaagttctagccagaacaattaggcaaggaaatgaaataaaatgaactcaaattggaaaggaagaaataaaactatttccggatgataccaccttatatagagacaatcctaaataatccattattagaattatcagaactaattaacaagatcagcaaggttacaggatataaaattaaaattcctatacactagtaatgaataatccaaaaataaaattcaaaaaacaatcccacttacaatagcatcaagaaaataaaatccttatgaataaatttaacagaagtctaaaacttatatatactctaaacacgacaaaatatcattgaaataaattaaagatggaaataaatgcaaagacatccatgttcatgatcagaagacttatattgttaagatggcaatacttaatattataaagtgatttacaaattgatttataggttcaaagtgattcgatgcaatctctgtcaaagtttcatagcattttttgcagttatttatactgcaaagtgatttacagatttaatgcaacccgtgtcaaaatcccatggccatttttgcagaaatggaaaagctattgctggaattcatatggattgcaagtgaccccaaatagccaaaacaatcctgataaagaacaaagctagacaaagtccatcttgcacttcctgatttcgaatcttacttcaaagctatggcagtgaaaacattgaactgagtacggtaatatttatcatctcaaaacctcacaacaatgcagtcaagtggaaccactgtctcagtatttcagatgcagagcccaggctcaaagaaatatggggaattgcttgaggtcagagagctgggtaaccacaaatgcgggtccacattcagatctgccctaagtataaagacattgcatcctctcagccactacctacaccactcttgagtttcttcgacacaggacctgtgaacagacagcccaagacgcttgggaatcatggaattctaacccccaaagcctggcttagggacctcatccagcgaccagacagggcgtgttgtgcctcatccacatttctgaaagtgtccactcagtggacagcctgctttctagtctctgccctactggcttgagtgtggatgcccagacggttaggaggcaagctccagagctcccatatgatcacttccactgtcacctgtgtgccacaagtgctctctgtacacatgctccacctgttctgatgatctttcagtctttcaacttccaagccatgtgagggatccttcaggaacatgagcactgggacatgctggacgctggagagagatgcagacacccagagctggctgagctaacatgctacagtttgtgaggaggagacacaaaatttcatacagatgataaaatttttctgtacaacaaacctttgctatagatcctacaatatatccattattctcactagaatgtgaacatgattctgcaaattcctagggagaaaacccagcctgccccttatcagaggctataaaccacctgtttttctttccatcctccttcccttgcttccctctcacacatcagtcctttagagaaaactgagcttttccaagctgttattgctcaaagaaatgtcttcatccaagggaaccaagggatgtgaagggcactggcctccgaagcatttgccattgtcaacttttattgagcacctactatgtaccaagtactgtgctaggttctgacgacactgaagaaacaaaaaaatagatacttcctaatctcaagggacagtccactggtggagtcagaccttcatcacgcacacacacaaacacaaagagagagacagaaagagagagagagagagtgagagagaaatacatgtattcagatactgctctgaaccttatctgggtccggagggcagagaaggcttcttgaactaggacctaagaaatgggaagaaatttgctagttaagcaggtgttgggggaaggtcctcagaagaacattctagaacaagtgcaaggtcccaagagggagggagatggtccattcctgcaactgaaagaagaccaatgtttctgaaccacatggagcaggaggaagcagcaggagaatccaacagggggagggtcagaaagcccatgtttgtaactaaccggaacgatgaatgtggtttggaagacaagtgagaggatgtgtaccacgggccagatgtgggagaccaaggaggggactagtgcatttttccagtaaagaaataatagtgcttggggctagggaggctcaaattgagaagaagacaagtggggaggtttaagagagatttctaaattaaaatgtacagggaatagtgacagatgatgcatggggtagagagagagaaggcaatgtcaagagtgactcccaaatctggcttgcaaacagaatgaacggtggtgtcattcactgagaaaggacacccaagaggaggatgtgattagcaggggagagagcaggagttcaagctgatatgtagatccacattaatatgtctagtcagaatgtggatacgtaggtttggggcttagaagaaaggtctggggtgaagatctaaccctagcagtcatctgcaaagagatggtaataaaataaatacaatttttaaatggatggaatttccagggaaaaagcagagggtgaaatgagtaaaggatctagggccaaggctaaaagaaatccattattagaaacagaaaaggtgtcttagtgcattcaggctgctataacaaagtaccatagcctgagtggcttataaaccacagaaattcatttctcacagttctggaggctgggaagtctaggatcaaggtgcaagtgagagtctgccttctggctcatagatgctgccttctggctatgttctcacatggtagaggatgtacggaagctctctgcgacttcatttatgaggacgctaatcccattcatgaagactccaccctcatgacttaatcacctccccaaatccccacctcctagtaccatcaccttgagggttaagatttcagtatatgaactttaggggtcacaagtattcagtctatagcaggaggaatagccaagaaggatgaatgaaaatcatacaaggatgatttcatggaaggcaagggagtacaatgtctcaaataaaccaagtcctgagtcaaacattactgagaatgtgagtgtaataaaaccgagactcaaaagtaggcattggatgtgatgacatgactatcactggttaccttagggagagaagttttggcggagttgacaagcacagtcagatggaatgtgctggcggatggcaaagatggggaaatgaagatacccagtgtagacagcttctgaaagcagctggccgtgagtcagaggtagacaggaaagtgactaatacagtgcagaggtcgacgtttttagctttattgtatttaagagagagacctgagcacatttaaaatgctgatgtgacattgtccaagctgagaggaaacaattagatctatatgagagaaaagaatgatgaatatcaggcaagtatggcaaagaccaccattacttttgcaccaacccaataagaaagttggaggatcttcacaaaacaaaggtggttttggcctgagtggggaggaggaacagcttctttactaccagtggaaagaaggagaggctggtgcaggggcagggaggtagcagggagcagagggaggccccatccacgctcaggttcttagaatgaggaagatgacattggcaggaccataggtgagcatcttctaacccaaggaagatttagaactaagtataggctgggcgcggtggctcacgcctgtaatcccagggcttcgagaggccgaggcgggtggatcacctgaggtcaggagttagagaccagcctgatcaacatggcaaaaacccatctctactaaaaatacaaaaattagccaggtgtgttggcgcctgtctgtagtcccagctactcaggaggctgaggcaggagaatcgcttgaacccaggaggtggaggttgcagtgagctgagatcacgccattgcactccagcctgggcaacaaagtcagattccatctcaaaaaaaaaaaaaaaaaaaaaaggaaactaagtatagaagtatggaatagaactatattctttctattaagatatttgtgctttgaaataagctatgtttacacacttgtaatgtttaagaatctgtggcctttcagagtcatatatgaacttttccttctaatataaaatgtttaacggagcaattgactttgacatcagattctaagttgaaatcttactgtatttaaataagatttggaacctgtaaaagaatttaagccttgccgtctttagaagtttaatgaattagatttataacaattacttaaatatctgagaaggtttgttagacaattgaagtacttaaaaaggaattaaaatatattaagcctataaatgcagtttacaatgtttagagcaatttaattaaaaacatttgtaaatgagacgaaacatttctcaaaggtactcttaaatgtgattgttaaaatttgctagacctataaataaataataagattcgtaagctgaatttcaaagcttatggaggaacttgggtccatatgaatttgttactttaataaattgaatgttaattttgaaaaacaaagaaacctttcatcaatatttttggcgcctaagagctgctcttgagggcatctaattaatagtttttttattatttaaaaaatatcattaggccaggtgcagtggctctctcctgtaatctcagcactttgggaggccgaggtgggtggatagcttgagcccaggagtttgaggccagcctgggcaacatggagaaaccttatctctactaaaaaaaaaaccacacaaaaattagctggatgtggtggcacaccgctacttaggagactgagatgggaggatcacctgagcccaggaggtggagggtgcagtgagccgagatcgcgcccctaccctccagcctggaagacacagtgagaccctgtctcaaacaaaatttttttaatggctataatgaaaaaaaaaaatcaaccagtatgtaaggaaaaagctgaagccctttgccccatttcccagaggtaaccatcattacaagttccttgtgtttctgcccagaaatgttatttgcataagcatagaatctctccccagccccatttttaaacaaagagatatattctgcatctaacattctgtactgcttttgtgcttaacaagataacttgagccgggtgtggtggttcatgcctgtaatcctcaagctttgggagctgagacaagaggattccttgaggccagaagttcaagatcagcctgggcaacatagtgagacccgatctgcaaaaaaacatgtaaaattagctgagcatggtggtgtacacctgtagtcccagctatttaggaggatgaagcaggaggatcacttgagcccaggaattcaaggctatagtgaaccatgatcacgccctgcactcctgcctgggcaacagagggagaccctgcctcaaaacaaacaaacaaacaaaaaacaatatatcttaaaaacatgttcatgtttcccataagaataaagattaacatccctctctcccttcctcatcgcctttggggtgtggcctcatgcctcccctctgggttgtgcccaaacttctctcaagagtggatcctctcactgtctctacttcctgcctccccagctactgactgtaccaagactgtgctttctgagggcaccaatgccctccaccttaccaaacccgctagaggcttctcagttctcatatctcttactctccggctttcaacacgtgagccatcttttccttgctgcattgcaaagccacctttatctagcaatgaattcccatttgtatctgggtctatttctggcctttccattctcttccattgatctctctgtccttgggtgcaagttttctgatgacctgacttgattcatggataaaacctatactcttgcagaatgaatgtccttcactcaatcctccataaataacaattctttcaatagagcttttctctctttcttaataagagatagggacagcagaggttcacgtatttcctggcaaggcccagaatgccgttattcttgattgagggcagagttatcagccaggcagatagtggaattgatatccctgtgtgaaaatggaagagccaatctgagctgtcgccccattcctacagaactagctgcccgtctttgaattcccagtgctcattcaggcctctgcactttcacttgagcacatctggcccccactttctcctttcctcctctcttctactaaatagtaaaagagctcttcttcacatctcagctcaggtgtccccttgcccaggaaacctttcctgaggctcctccctatgccccacattagccactctgggcttccctctgccccagcccttaacacaacagaatcaacatgcctgtaacagaattgccctatgccccctctcccctagaccaccgtgagctccccaagggcaggacctgtctctcagcagacttttactcttgttaccgaactgatcttgggtctgcccacccggcacagtgcagccaaacactgatattgggattgcagccagagaaagtgaggcatttattgcagggcgccaagcaagcagaattgggcagctcatgcttaagatcagaactccctgatggcttacaggtaagggtttttaaaggtagagggggagaggttacaggcaaaatcataaattaatacatggagactatgtgttggtttggcctaaaaaggcaaagcatcttgaagcggaagtttgggagtgtggcaagtgaaaggtggattcaaagatttttcagtgttgtgatgggttaaggaggtgaagttttgtctaaaattttggtgtaggcagaaaagaacgttagctcttgcccgtgggcatgatctcttccaggtccctcagcaagaaacttaggagaaagcatggtggttggagttcggtcctcagcttccccttatccaaggtctctgtgcctgcagatggcactttccatttggtggaggtctgggtttctgaaacacaactcagggacgtaggttgagatgttatctttagtttctacaggaaaccaaatatcctatgactctaatttccttggctattgtcttaagctactattaccttcttgcttgtcaagttgcgcatttacttttcaaggcttgctacgtgcctggaatttctagattttcctttatttccatgcttggggagaggagtgcctggcaggctcctaagaggggtctgtgctccatctcgccccctatcttgaactatcggttgggtgctctagaatctgtatggggtggaagtgttcattcattttctgtacaaaagcaatcaatgcttattgtggaaaacccaaataagagagttgctctaaacaacaccctccccagtcccaataccttgtccagaagaaaccactgtttggtgagtatattagtcaatgtctgcagaccagatcggatgaccaagttttccataaatggatggccatccacttcccttcaagggcgagggtagtttgttctgatccatctcccttttcacagctcagggagggaggaagacccaggaaggagagctgccacagttactagtggcccagctgggatttaaagtccgccgtgactgaagcttggctccacatgccagtctgcaaggccctgagtgccctcagcagtaattccaagcaaagcagggaagcagcgggccaggtgctgaactgaactgctgctcagggctcctgagcctccccctgcctcctccctctcttctccaccctggggcctctctctctgtccctacttcctcctttagatcctctttcccctgaacccactcatttatcaccttttgatgagttccaccaggcagaccatgtcaggaaatttcttggtgttcattttaataaaacttaattattaagacagcctcacaagtcatgatacatttactggttcatttttcacatctccgtcagaggcctcctggcagccacgtgggaggcatgaaggctatggggtggaagtgtcagagccttttctggcctcctgcaggagctgggtttggggaagcagttcctgacccttcctctgccggcccacccccgttattctccagacgctgaggatgggatggaatgagcaccaaacatggagtcaggagacctgggactcaatcctcctcctgctgcagactatgctcagaccctgctgaaggaaggcatcctctctgggcctcagctgtctcatgtacaagatgggaatcatctcagtccaaaccagacagagccactgtgagattcagaagaaagctctcgcaatgagaggcctccccaggcagatggaggcaaaactgcaagggtggattgacgctggggcggcgcctgccccacagtcctgtaggtccgcccgcctgggtaagggatggggtgaaattgggggtctctgatgatcacagtaataactgactttttaaaaaattttatttttccataggttattggtgtacaggtggtgtttggttacatgagtaagttctttagtggtgatttgtgagattttggtgcacccatcacccaagcagtatacactgcactccatttgcaatcttttatccctcgcccccctcccaccctcccccccaagtccccaaagtccattgtatcagttttatgcctttgcgtcctcatagcttagctcccacacatcagtgagaacatacgacgtttggttttccattcctgagttacttcacttagaataatagtctccaatctcatccaggtcactacaaatgctgataattcattcctttttatagctgagtagtattccattgtatctacatataccacagtttctttatccactcgttgattgatggacatttgggtcggttccacgattttgcaattgcgaattgtgctgctataaacatgtgtgtgcaagtatctttttcatataaagacttcttttcctctgggtagatacccagtagtgggattgctggatcaaatggtagttctacctctagtactttaaggaatctccacactgttttccatcgtggctgttctagctgacattccaacgagcagtgtagaagtgttccctgttcactgcatccacacctacatctactgttttttgattttttattatggccattcttacaggagtgaggtggtgtcgcattgtggttttgatttgcatttcccttatcattagtgatgttgagcattttttcatatgtttcttagccatttgtatatctttttctgagaattgtttataattgacatttattaagtgctttgcagacgctgtgccaaggatgtcatgttgtcatatgtattagctggctaaatctcacagttgctgtacttgttactaatattgtaaaatgtgtaccagtgttatgcccattttatagttgagaaaactgaggcatagggaggcaaaagcaacgtgcccgaagttacaaagccagtcaatggtggaaccagaattagaactctggccaactccagagtctaccttcttaccaataaagtcatcacccctgagaaatcagggaggggccaggagtttttaataatcaaagcaacctcacaccgaagtctaagggaaagcagaggttcggctgagcaccagggcccctggcagctcagcatgggggccgtcagtgacacctgcactcatgatatcccacacctgtggtcttccaaggggacagactgaactcttgccacttcatccacaaagcccccctctatttcctcctttccctcgactgcacttccttgataacagacccaattttgttcagcaattcacccccagggaagctgacccacaaatcccatgatgccaacagggtcccagtatctttgccagttctctgacccagcctcacaccagggtgtggcatgagcaacgagacagggtagtgttggtgcaggtgacacagggctaggatatggcacaggaatttagaaaataattagactgcgttgggcgtcaggacacaccactccaaaatatgactgtaggcgaccaggaatctgccacagcaaaatctactttggcatttttcaagctagttattatgagaaactgcagacacaggagtagctctgaaaagctgtccttttgtaaaagaaatttacatctataaaggaaatccacattagtaaaacaatctgtatcaggaagagggctgctcagagacagcttctattacccgagaggctttttatctttataacgagacaacctttacttatcatacatttcctccccttaccctccaagaactccaccatctccgagaaacccaaagcacccctattcctttctgtagctcaggatgctacattagcttcaatcatctggccctactttgagtctcatgtattgtgggaacccccgccccccatacctatgcaagtaattataaatgtttttgcttctgctaatctgtcttatgtaaatttaatttatagctcagtcaaagaacctagaagtgtgggggttaaccaccgttccctcccctgcaagaggattggtctatgagagaagtcagcttccatttatcgagcacctagtaagcaccaggccccagaccttaagctttacatgtgttatttctgattcccatagactcctctagcttcagtggtattacttgcattttgctgatgaataaacggaggttcagagagggtaagtgacttgtccaaggtcacacaaccaggaaacagcaatgctgcgagtggaacccaggtgttgtgtccgtgggtctgtggtctcgctgacttcaagaatgaagccaccagaccttcacggggagtgtgacagccctcaaaggtggcaaggacccaaagagtgagcagcagcaagattttttgtgaagagcaacagaacaaaccccccaccgcgtagaaggggaccccactgggttgccgccgctggtcagggtagccagcttttatttccttatttgtccctgcccatgtcctgctgattggtccattttacagagtgccaattggtccattttacaaagtgctgattggtccactttacagagtgctgattggtctattttacaaacctctagctagctacagagtgctgattggtgcattttgacagagcactgattggtacatttcacaaacctctagctagctacagagtgctgattggtgcattttacaatccccttgtaagacagaaaagttcttcaagtccccacccgacccagaagtccagctggcttcacctctcagtgtgaccaacctccaagcttttttatttcattgcttggcttccctctctaccatgtccatttctgcacatttatttcagcctcacattgaccagctcctgcgtgccaggcatggcctaagtgttattcgaacaaagcttcggaagctagtccacttgcttctgtctagaagaggagggcggtgctgggaggaacctccctgactcctgctgcagacccactgagaggtgactcccacacggctgtcctggaacaagacagcagcttttcttaggttgttctaagttaagggctctcactgctggtaagacagggaaatagaggagataaaaataacaaaacaaaaggagaagtcacaaagttacaggaaatctcaatatatctttctgttctggatgctgctccaaacacaactgcagcagggcctctttgtggggggttcttatttgagagccacaaaggacctcaaagccaaaacagactgattatctagcccacctccatgtcctcccctccttccccctacttccttactaacagacccaattttgttcaggaatccaccccctgccgagaagaaactgatcctattcccagctcagagccaaatcctgaatcatccaatattacccccttgtcaggagtaggttgaggggtgacaagtggcccatgctttttctggggtcagggagaagaaatgattattagaacaattttggtttaaactttttttttttttttgaaacagggtctcactctgtcacccaggctggaatgcagtggtgcgatctcagctcactgcagcctcaacctctgcagcctcaagtgattctcccacctcagcctcctgactagctgtgactacaggcctgtgccaccatgcctcgctaatttttgtattttttgtagagacagtgttttgccatgttgcccaggatggtctttcacttctgagctcaagcaatccatcagccttggcctcccaaagtgctgggattacaggcatgagctactgcacccagcctaaacttgtttctaattagcagttccaaatttttagatgctcatatctctgactaattacaataacagatgatgaaatatcgaagtgttgaactgtcctctcaattccagccggaacaaacagattctgttttctctacattttgactgaactgtcttggtgtcatacattagatggtaaacttctcctctgttccaatctcccccttcttcatggctaattagttaaaagcacactgttgataaacacaatatgaatagaaaaatttttgtttagccttaaaaaatagcagtatgacaatttgtcttgaattttgacctttcagtggtggcttgtatcaaagttacggtcttgggatagtgctatgacccgctgaaatggctgcgggcctgaaattttgatcgtaaggcaaattttggtacagaaaatcgcctgtttctgctgacttctgctttagacatccactcttaaggaaaagcattgttatcccaccagctaacacatcactctctaccatatatcaaagagtctcaagatccttctattcatgaaaaatgaaaatattctcaccacatcctcgcagtaatgttcaacataaattaccaagcacagagacagtttgggaatgtacattataaatggccttccctacaagactaagagtgaatcctaatgtaaactatagactttgggtggtaataatgtgttaatgtcggttgacagattgtaataaatgcaccgctgtaatgtggaatgttgaagtgagggaagctgtaagtgtatggagacagataaatgggaattctctgtactttctgctcaattttactgtgaacctaagactgctcaaaaaagtagaagtaagtaaatacataagtcagtaaataaatggccttttcttgggctgagaaatgaagacatttcctatatgttacttggacctgtaaattcactctggggagatatatatatatatcagaaagtatatgttacttggacctgtaaattcactctggggatgtgtgtgtatatatatatacacatatatattacatatatatatatacacatatatattagaaagtaaatatttcttgttaaaatctgagatataactgccctctaaaggtgtttatttcctgggttggcttttttgttttgttttgttttgtttatttgtttttgaggcagagtctcgttctgtagcccaggctggagtgcggtggcacagtctccactcactgcaacctccacctcctgggtcccagttcaagcaattctcctgcctcagcctcccaagtagctgggattacaggcacatgccaccatgctcagctaatttttgtattttttagtagagacacagtttcaccgtgtgggccaggctggtcttgaactcctgaccttgtgatctgcctgcctcggcctcccaaagtgctgggattagaggtgtgagtgaaagcacctggccgggttggctcttatctatttacttgatagccaggtttggagtcattagtggctgttgcttactccttgaacaaacatttttgagtgttgtgctgtacaggccactggatagatagcgatgaatcccacacagtcctgtcctcagagcccacatcttcatagatctataaattaatatttgcagtagagtatgacaaaaaaactccaatagaagtgcctccagggaagatggtaccaattgaactggttgctggggaggtgtcaggggagggttcatggcagaagcctcattgaaggatctcagaatttcatgcctcctgggaggttcagtccaagacacctacctccatctttcagtgcagagggcacatgaggggacctgccaagatgaagccagagaggcaacagtggtcaaatgatagaaggcctggggcgggaaggggcaggtaaagatttggggctttatccaaatggactttattgtagttgtattcatttgataccttttgtaagttccttgtttagttattacatgattatcataaagtttgggagcataatggttagaaagatatcacagacttaggaaaaggatgcatgttcctttaatttggctcttttaatggactgagagactatgcaacgctcatggctggaggacaagcttccccggccttccagtcccataaggacacctgctgttaatggcagtcctgatggagtgtagatccctcgggctgccatcctcacaaaggtgtgttactttctggctggcagctccagatggccctagggactctgaactcagcctgtgtccgaaggcttactgcaagactgtgcgactccaccatggtcagtttccccggggaaccatctctctaccaagcccagttttccattgcaagaacaattgccaagatgtctaagtttctatgtgagaattttggcatcttgggttccttttaaataggacacacttgtatgctctaaagaaaaaaagaaaaggtttctcatgaagcattagctttcaagattacagttcggtaggatgttcaagatgcttagggtgaataaaaatgacagacagctgaacacttcctataaatgaaacaccaatatagatctaagtttcatgcatgactctcaatgtggttaatgaaaaggaagataaaaaaaaaaaaggttggccatatttgcagggcatttgctcccaaatgtttcaatcctgttttctttagactttgaaaagggggattgcacgttatctgtcaagaaggcatcaaagcagagaaatccacaaatgtgtagtgtcagatagaattcaagccttcagaaaggactccactcctttggttactaagagaactaggggcttgtatttctaagatgtcactagctggaggcgctgagcaggtaatggtctatgttttcctagactataaaatcctgattatatggtttaataaaataagaatctcagagttctgatggaaaacaagtaaacttcaggtcttagcaggcactagcagaaagcaccagagaaaactgggggagaggttaggactcctgtcccaaagatccccctcaattatcctgccatgttatcagttccctctttacatgttaccaaacatgactactaatttctatttttttccaagactattagatgtattcaaaattcactcttcttacaaggatagagaaaagtgcctatcgatgcttaataacccaacatatatttaatagaagaattaaatcaccttctgcaaaggaccaagaaaagctccatttgatcaattcctttaagacatgaagacttctccttttctaagaatcgccatagtaaaatgcaagctcagcatgacataccccaaggaaaaatgtatctgtcccttctgcttttactacagttccataagggtaataccgagttgttttgcccacatgggggctctggaatcttggctgtgatgcattggtaggatatttgtcaccaaaactgactcagcaatcagttaaatattaaacaaagcactgattagtgttcctgattcatatttgtgctttgtttaacatttaacttccgaattttatacatctattaaacaatattcctcttgacattcgaacactatctgcacaattaataaatcaaaaacttattaaaaattgaaacaattaaaaattcccaaacttataaaccattgtttacaaaattatttaaccacactctccaacacttttaaataaaaccataagtttaatatgtcagacccttttaaatgtttcaaacacctaaaaagtcagcaaaaatgcacacaaaacgtcatactgattgaaaaatatatatgcacacttacctttacactggttacaaaggcatgaagattatgggtatatattggttttaaaaagtacttttatacttattcttatattttctctgttactttcttagagtcaatgcgatcgtttcctaggattagagtatgaagtgatacagtttctcctaagaatacaaatttctttcagaaccaaaagaaaaataatctcaggccagccagctctggggttactgattcttatttgaaactgataaagtgtctcccaacattattgcacttgagcttaaatgtggcctaagaatataaaagtccgtgccttcacattggtatccttttctgagaccagagtgtttcctaaagtgcgcttcatctcctaggagactagggattttttttttttttttttgagacaaagtctcgctctatcacccaggctagagtgcagtgttgtgatctcggctcactgcagcctctgcctcctgggttcaagagattctcatgccaccacgcctggttaattttttgtattttttgtatttgagatggggtctctccatatttcacaggctggtctcaaactcccaggatcaagtgatccacccacctcaacctcccaaactgctgggattacaggcgtgaggcactgcacccggccaagacgaggaatttaaaccctgcagtttgctgtccttacgagcacatttggccaattatccttccatgttatcagttccctctttacatgttaccaagcatgactactaatttctatttttttccaggactattagttgtattcaaaattcactctttccttcttacaaggatagagaaaagtgcctatcgatgcttaataacccaacatatatttaatagaagaaataatatcacccatatataaatctgccattaaaaataatatgaaataaaaccctatcgcatttgccatttacatcaacttttctcttcatagcttcattaggaacttacagctcttcacagactccatgtgttttaattgattatagccatcaatcttatttgatattcaaaatctcagagcttgaccagaggaaacctctttaatctagcttcttagtccttccagaaccaccctgtgatattctagaaagcatccttgctttctggttacaaaagaaacttccaggcttaaaccatttgttttaccctactcaggacaacccttccaaagagcccctgtttctttaagtggagaaaactgttagagacaaagtctggccatttaggggtacaggagagttgtggtgggcattagtactactcctgctgctgctgctgctgctgctgctgtgtccactgttagtgacagaagtgggaaaatatttaagttgagttcacattagtgttcccagtttagcgtgagcattgctccattatgttgttctaatgtaaaaatgtcaaacacatttttctcaatgagatacttaacattttaacccttcatccaagctatatgttacacctcacttttctatagttgtatatttagaaaataaatatttatgaaatacttgatatttctcatcaatccttggtcactcaattgaagggtgtagaagtaaggtcaggttcaccttagtgaggggcctgcatctaaccttatctgaaggggcttatgaatttgggatttattaccttgacagaaagaaatattgagaatgaccccacccatgctttatagcaatcgctctttatagtttatttcatagtgacaagaaggaactcatccatggtgggtttttccctgagtggtctgtatggtcatatcagaactgaaatcatcccttcttgcttctgagcccccgtttccaagtcttgttctttgtttctgtaggtagtaaagtgaattctttaaatccctgccctccatcagctgctaaagcattctgcttccctctgataagattaacagaatgttggctgtggttacgggatgctttgcagtctatgtcttaaaccaagccagccatgttagcatttcctctagtggtggtgttttaggccaattgagaatgtgggtgatattaatattttccaaccagctgataacaggaaagacacttctgcttggagtccactttgagaagagatttattatttaggcagcacaggacacctccattaatcttcccccagcagtgcccatctaccatcaagttcatatactttccccagggttcaaagaagggtataattttagccagcgattagtcaatatttatcaataagaataataacagtaaaattacaatggccaatgtttgaatccctaatgtgtgccaggcacagtacggggccttttgcagctattatatcataaaacccttacaacagccccatgaaatttgcaccatgatttgcttcattttacttttggggaaaccacggatcaagtaactgaagtgatttctctaggactcacagatgagcggtggcagagcctggaattagatatatctgatgttagtgttttgaggaatcactctccccaaaagccatagctcccagacattcttatgtaatttgtctttgctgaggcttgggtattgatgatttaaaagtccccagagaccagatttcatctggtatgctgtgggagtcaagtaacgtccaaggccaagcctgtctgagagaggtttttattagctccaaaattataataacttccacagccttcttccaccaattctgccttccactgaaacagcgctggtgatgtttagaggtatgagtttgggacaattatcaggagaagcattttggtgctattgtcccaccccttctgtcctgagaggttttatctggtctttcagtatttcaaataggtcatgactagattccatgcatccctagaaaacatagcctaaattttaaattaaagtatgaggtggaagaaacagcctttcttcccttttgtttccaaggacagatggagtcaaaagtggaactggggcccgcagagccggatagcttgggcagtacgtgtgtgcacctgcaggctgtggagacaggtatttccatggagctcactcgccctgcctctcatccaggcctgaaaatcataggtaactatgaggcaagaggaacccagggtggtgggaacaccctagggtgatcccaggctggggacctttggactaaaaagatgaaagccaacattccctccccaggaggagatgcaactcctgcactctctagtgaccatcactgggatattgcacagatctgcagtcaccttctaaatccccttaaagtggacctagccatcctctccattttaagaccacatctcctgtctgctacagcccctctcgcttctttttctttaaggatatctggctggttgtattgggttaacatgcaagaagagagtaccaatcactccataacttgggtaatgcatgtcaatggtgatctgtgtggggccgcaaggttccagatggttgggacaactctacaatcagtcacatttgggttggttaaatcccccactcatctttacagctgtatcctgcaagttagtggctgcctgtctctgaacttcaccttccttatggttgtcaaaaatacctccatgggataaaaacgcagcatctgtagattcccaaataggtgcaagtagattcccaaataggtgcaaataggttcattcgttggttcattctgcagtcagggagctttcagtctactggcatgcaagacgcaatgataatgagaatacttcacaatgagtgtgacgtgatgactgatgaatgtgacaaaggagaagtaggatgcacttagacagcctgggggaattgagttgtggccagaagggagagagagtgtccattctccacctcatcactttgctgccaagagaaacaggaatttcttagacaagttctcaggtccctcggtgagactggcagcctaaaaaaggcaccagggagcagggggcactcacatcatgccatccccccacagagcatcccgctggccatctgcatcagcccgacccccacaggatagaagactggcacatccaagttgctccttccacaccctctccccactgaggcctcgtctcctccgccctgtggccaattgaaggtgaactcctaacgtgcattctgcctgggatcccagaggttgtggcagccagatgagtcacctcacaaatacagcacgtgttcctcgggggcggcggtgggaggaaacacgtgaagagctctctctgtgataatagaccatttagagcttcagatggcgaaaacaagctgatcaggtgcaggccctccaggaggctggcaggtgactcccagccagcacgccctccatcgcacgttggggaagctggaaagagcctggtggctgccgggcctccctctggcatcctctctccctccaaggctgtgtgctccccaccttgtctctccttttttcattccattgctctgttctgtttctgtctacccattcgtcttttcttcctcttctctttctgttgccattctctttctcttctcctctcaacatgtccttctctctacccgtttccccctccccttctctctctcctccctctttccctctccctctcttcctttcccaaatctctcttagccaggctccttttcgccctttgcctctcaaaccctcctccacctttccaccctctctctgcgttctgcttctcccttcttccttccgtgtctctggctcacttatctgccctctccacatcttcttccatttgccaccctccctctctgtagccacacccagtgggctcagagctgggtctttcttttttttgttttttcttttttctttttttttttttttgagatggagtttcactcttgttgcccaggctggagtgcagtggcgcaatctccactcactgcaatctctgcctcctagtttcaagcaattctcttgcctcagcctcctgagtagctgcgattacagtcatgcgccaccacgcccggctaattttgtatttttagtagagacgggatttctccatgttggtcaggctagtctcaagctcccgacctcaggtgatctgcctgcctcggcctctcaaagtgccaggattataggtgtaagccaccgcacccagccagatctaggtctttcatccccctacacaaccctggcctggcctgggcctctggtcttgggcctggaagggagtcccatcctccctccctcagctggatttcttaaggataaaacctttgctccttccttcaccacacctctccacatcccaaactcaagcccacagagcccagctctgggcccagggtgtggacggggagggtggctggtggcccagagctgagccctgtgagtcaacagcatgcctagactcacacacagacacatggcccaccttcagggtcatgaggattcataaaccctattctgcgaagtgcctccaggaatcatcaagggagctagggcagctctgagtctccaccaggcccaccctccgcctctcagggctgagcttcacttcccttcccaaaggggccagggagaggggctgctgatgacatgatctcagaggaaggccaaggcctccaggctgcctctgggcctggcacaggaaggaggaggagaaaatagggagcccaaggaaagatcaacccagcccagcccaaggacccccagccccagccccagccccagctgggctcaaactaattgaaaacagactggaaaaggctgcttttgcccttcctctagactcagcatcatcaagactggagggacagagcatttgaatcatcagacgctgggccagacgtcaccccacgcgttttctcattttatcgtcctaagaagcccagaaggtgcgtaaaatggcctgtcccaaacagatgaggacattacctttctcctcttcctcctcctccttcttcttcttcttctttttgcttcatttttctttcattttttcccccagatgttgcatttcagagaggctgagcgtgttgactaaggtcacacagctacaaacatcagggacctgcgaaaaagctctgttccctggtgacaggtgttctgtgatcctaacacagccggaggtggggacaacgtccttgcagtaacaaaggccctgttgctcaactcagtggacatcaggccctgttttcattcattagcaggtcagggattccagtgtcacctgtgccatgtattccagctgatctacctgcaagcctctactccccattttcccagcagcagccgcagacaccacccaactggcagaaatttcaaacaaggggttctgccttgcactccggtgcaagggttgggcacgtggactcacatgtgaccaatcacattgtctttcctgagatcctgcattttgaccagaggaatcaagaacaaaaagtggtggcaactgatttatccttaagaaatccaagtaatgagttcctgctgccaagatttctgggatttccctggctcctgccagtttctggatttggttcttaagcattttctgggtgtgtgagccccatacccttctcatagcttcttcagccagagtcagtttctggtttttgcaatcaaaaataacccaactaagatttgctatcctgcaggcaagagagggccacagcttgatagtcaaggttagccattgtctgggccctgcctgccccagccagctttctttcctccccagcctgtacctgccaccctgagcacaccacactggtacacgcctgtgtacttgtcttttatggtctcactataatttatttaatccctcattaatgaacatttctaagttgaagtataattcatgtattagtcagggttctccagagaaacagaaccaacaggatgtgtgtgtatatatattatacacattattatatattacacacatgcacacacacagacatatctatatatctagagagagaaagagatttcctttaaggaattggcctacatgattgtaggggctggcaaattcaaaatcggcagggcaagtagtcaagggaaattcaaaattggcagggcaagaagcctagggaaaagttgcaggcagaattgtttcttcctgggagagacctcagtctttttccctgaaggccttcagctgactcaatgaagtttacccatattatggagagtaatccactttcttcaaagactcctgctttaaatgttaatttctttgaaaaaattgccttcacagcaacatctagactggtgtttgaccaaacaactgggtactatggcctaggcaagttgacacgcaaaattaaccgacacaattcacataccgtagcataaaatgaacccttctaaagtgcacaattccatgtttttagcatgttcacaaggtcatcatcatcacgatatagtcacggaacttttttttttttttttttaagacagggtctggctgtgtcacccaggctggagtgcagtgaagtgatctcaactcactataacctccacctcctcagttcaagcaatcctcccacctcagcccctcgagtagctggaaccacaggcgcatgccaccaaatccagctaatttttgtattttttgtagagacaggggccatgttacccaggctggtctcgaactcctgggctcaaggtatccacctaccctggcctcccaaagtgctgggattacaggcatgaaccactgcgcacggcccagtcacagtacatttttcttgccccagaaaaaaaaccctgactcctcccagctcctggcaaccaataaacacattggtctgcatgttgttcatgctggttcaccttcctccttgcctccctttgactgcctcataaatttccactcattcctcaagagttagcccttctgaaatatcttccttgatcccacctactagaagcaccctgtcccacctcaaactgagtcaatcactttattttctgtgaacccccaatataagctgatggtgcctcctggaatagcctttagcaaaagatattaaaattgcctaatcaacttgcttctctttctcaccaaaccagcagttcttaaattatgatttcagggcttcttgacacttaccccatatttttaccatttgatgtgcttgtgtttccgggaagagagttcagggtttcatcagatcttcaaaaggatcccaggaagggccaagagccttgagattagggcttctcgaagggcagaggcatgcttcatgagttcccttgtgtccttatgcctggtgcagatgaggtctgctggatgagcctgggtgatgaatgagtagtcacatgtaggaaaagtgtccttccttcaagggttttccatcatcactctctatgaagcagtgaaaaagcaaaacaaagtaacatacggttaagcatcagaggaggaggatagacacataattacatattcatttgttcatctgctcatccattcacaatttagtgtatgcatctacaaggtacaaagcccagtgctcccagcagcgggtgttcagagctccgagaagcaagcaggcaccacatgttggtctcagaaggtagagagagactgtaaagtaaaccaaggaaggctccctgggggagaggccgcatgacatgagcgaagccaagagcaaggactgggactcagccagatggaacagagcccggggaagggtgtcttgagtgtgtgtgctggggggagcatccacgtgagcaaatgccaggcctgcagaggacccagagaagggagagaatttacacacccacagtccctgaagcctggagaggactttttaagattcccggtgacggtgcagagaagctgagccggggcctgactacagtgaggtgtggggtgtaattaccaagccagagtgcagagctgagccaagcaggtaagagtactgaccccgagcccactcgggctctgagcagaaggaagatttcattagtgttagagaggaaggatgtgccttctcccccggaggccagagggcaggagaccagccaggcggggaggctgacccaatggccccggaatggtgatggagcagcctgggaggctgcaggcactgaaggaagaggtaggggacgatgactccatctgtcacctcggcacttaccccaaaagatggaggactgctggcagaaacagacagaaatttcccttgagaaggagaaagccatgctataggcaatcaagatttgcacattgtcagcagagaaggaatgagactgtctggttgccgctagactttggccagggctgtcctgcaggtaagggcctcgtgcaggaggcccctgggcaagggccggcccttctcctctccctcagtgtcctggaaaggccccagggctgccccaacccctgacctctctccttctttctccatattgctagacccccttctcttggtcccctgcctcctcccactggtgtgcacccacaccttcagacagttctgagcagaccacgcaaaatacaactgtgatgttatttgcagcaggcattctggacccagaactgtgcttggtcttgaagttgaaaggtagcaatcactcatactcctctcccatgaacaatttgagaaaaaatggaggctcagggcagaagttaccccctttacaactgacgggagctatcctggggaatgaagcctgaggctaaaacctatgccctatttccagcctcatgaagtaaacttagccactgggtccctagcaaagaaactggagaactgagggtctcccccaggtctgccctccaactgccccaagccccacatgcctgcaggcggccctgggatatctgccatgtgcagggaataatgagcctggcagctgcaagaaggagatgagctccagggtttgagggttaaggacattcaccagtctcccagcacactcatctccaccccaccccagtgaatgagactgagagggctcaaggtgggggcaacaggttctctccattaccttccagccaatacctgcatgtacattgagatactcagtaagccatgagaagcgctgtgtgaccatgactgagttgtttaaactctctgttcatgctcctcccctgcaaagtgaaggcattcaaaatcatctgtattcatggtgaacctactttgttctaaggcctctgggacatccaaagttggataggccatgtccctgacccagctgactgctctcacccttgctttcactgtgtgaaattctcccacattgacgggctgggggtagggcaactacaattgagaagcacaagggagccccccgtggtgatgaaacagttggtatcttgactgtggtgtttacacaaatctatgtgtgtgataaaatgacacagaactacacacatacacacacccataagagtgcatataaaactggttagatccaagcaaggtgtgtggaccatgccaatgtcagttttttgactttgacattgtcctgtggttccctaagatgttaccactgggggaaactgggtgaagggtgcaagggcctctcagtattattatgggaattttctgtgagtctataatcctttcaaaagaaaaggttattaaaaaatctcacatgacttctcactactctgcttataaaatccacactcctcacggagcaccacaggcccgctgtaatctggcctctgtctcctctccaacctctccccaagctccctaggcccagccccatccccttctctctgcaccttgagcacacccagcccactctgtgaggctgtaggccttgctgtttcttttacctcaagttctctcgccccaaatcctaaacacaagtaacttctgtcattcaaatttcacaatcagtctccttttcttgtaaggccttctttctcaggctgatcccttcagccctaatacagttggcccttccactgtgtttagggtgctacatcaccatcacctcttggtttttggctaagatcaagtgtagagtcctgctatcatcagacatgatctgattcgtttgtttgcttacctatcactgtcagtccggacctcccctccctctgagaatgaagcagagaaaatgttatcttggtcaccagtgtatcctggaaactgcaacaggggcaggcacaggcaggagtgcagtgaatatcaatggtagatgaatgaatgaatgaatgaagaatgaatgaagaatgaatgaatgaatgcaccacacaaagtagcattctagcagaagtgaaaacaaggttacctagtgcagactttcccagccaggactcatactatttttaaacacatacacctgcttcggtgatgtactgaaggcctcaggctactctccccgcccacatctcccacccctctaacaggattcaaatctccagtgctcatatttcctcctcatcacttacctagcaaatctggctcacagtataatatcagtcatttatacttcagtctgaattccaggtcagtgccaacttcctccagatatttgtggtttaagcttcatgtgatattacgtcatcttaagggcatttagtaaaggggaagaaggaacatttttggacagaggccttttcctgtgctcatttgtgcctcacaggaagccaagagtaaatgtgcatctagacctacaggggaggtcttggcagttacagcaaactcagggaattttaaatatgccggaaactttccagagccctgagttgcagtcccagctctgtcactgtctctctgtgctttgctaaacagacttcgcccctccgtgggccgtctgtgaaaatagggcccagctcgatggcatataaaggccctctgacttccagtagtaaaactctagaggagcccttgttttctggggagactctttctgagttttcataataatgttgagtagttctcttttcttgctcacgccgacttttctccagttctcggacaccagttctgggtacccaacaattcaatccagttctgacactaactatccagagttagcagaggccccacaggttaaaggcctcgtcccacaaaactgcccccacttcagacaccagtggccagtctcagaccccctgtacttctgaccaaccagctataagtcaaggattcctaagactccttcctcaggtctaataatttgctaaagaagctcacagaactcaggaacacactttacttatgtttactggtttgttttcaaggatgcaactcagaaacagccaaatgaaatgactgaatcaggcaagatatggggttgggggatgaggcatcgagtttctatgccctctccaggcatgcctttctcccagcacttggacgcgttctccaacagggaagctctccaaatcttggtgcttaggggtttttatggaggttcaattacataagcatgattgatcaaattattggccaatggtgactgactcaatctccagcctcttccttctctccagaagttggggatggggctgaaagtctcaagcttccagtcaaggcttggtctttttggtgaccagcccaatcctgaagctatcaaaggctcaccaagagtcacctcactggaacaaaagatgctcctataccctcatcactcgggaaactccaagggttttaggggctttgtgctaggaatgggagacagagaccaaatatctatctatttatttatttatttatttattttttgagacggagtctcactctgtcacccaggctggagtgcagtggcacaacatctgcctcccaggttcaagtgattctcctgcctcagcctcccaagtagctgggactacaggtgcccaccaccatgcctggctaatttttgtatttttagtagagacggggtttcaccatgctggccaggatggtattgattccctgacctcatgatccaaccaccttgacctcccaaagtgctgggattacaggcgtaagccacctcccccggcccctttctatgacaccacagatgggcacagtcagaatcagagcctgaggtgcaggtcaaatcccttagccctccaccagtcccgcccacttggtttctgtggtagaaagttttgtttactatctgtatctgtatcccccaccaaatgcgagctcccccatcccaccctgatgctgaactgaggacactcagggctttgtgtggctctggcagcttgcacaatgggttctcagatgaggtattccatgcccttcttcctggagtagtaagagtcaatgcttttcagttcagcagaaattcatgagatattagaaagcacttcctagatctgcgtagaagttggaataggttgcatatagaagctaggaaggttccatccctggagatctttaggaagatcccattgctctgggtgactcagtcgctcatttcaatcatgaattacaggcattatcgagttaagtcaccatggtggctggacctgctttctccaaagtccctccagctgcaggttggtgagcccatagatggggttagtgaagcattgttggtcagctcaccagggcacccttatgagagtgaagtagaccgtgactcctctgcagttggttaaggaagaggacactgaacaaagtcatgtgttaagagtggtgtttggctggcaaattctgattcatctttcaggaccctgctcaagcatctcctcttttgagaagcctggcctggccctctccccatgccccactcttccttccccaggtttaattaaatgtctcttctcagctggtgtgacctcttggttgattgcaaatagtgcatactccactctctctccacggaactgtgagctttctaagggccagaaccatacccacctcatctctcactgcctccctggtgccatcgcaggacaggtggggcagagcaggggcccggtggctgctggctaaattgttggagggactggctgggagcccatacatcacagacagcagataccccagggactggcagtgtgggaaccaggtgagaagccccagtctcaggtctgcagccttcctcagtctcctcactcagtagccttgattcccagcaaaccacatcaatttctcattgcacaccctgctcaatgctcatctgcatagtgtcctccatccagagcagccctgagctgtgggcacgaatactaatggatcatgcaaatgccagcctagggcaagagtgccctggactgtcaattagctccccccagcaccagctacagtgcccaaccccttcacttgatacaggccagcccaatgcaagaaggagcaacagaaaaagaactcggcttgaaggactgctctagtcaaggtagtgtgttgtggcagcctggaaagggatcttccatgtagagtgagggaagaagagagccagcctggcctctcaggaagaggttcccacaggcactcttgggaggaaaggtggtgctcttgggggcccaggtaataattgctacacgaatgccacggctcttggaactgctgcttcatccttttccctccacctggccatctatgtgccaggccaccagcgtacgtcctgtgttgtcctctaaaccaagaccaaagctcttcacagccactcttctctgacccagtaccaactccatcctgggagggaggatgacaggctccccgtcccctcacctcttcttcccaatactgctgtttcctcccagttctttctcttccctccactgctcccatctgctttccttccttagtggataaaagcattaaatttgaaggcagagagatcgggttcaaacccagactctacagatcactcaagctttgtggcttgggcgaattacaccatgcctctgaacttcagtttgctagtctataaaatggagaaaagagaagtacctgccacagtggcattgtgaggatcattttatgaatagctaagaatttcaggtaactcactctgatgtaccagaaagttactttgcttactgcttcaatcactgaacttaatttctactccaagttcccattcctctcagtggcagagaaccctcaatcagttcaggatgccccatccccagtgttgcctgaatgttttggggtgggcttacggagcatggagcctgaagtgggctctacctctggtgggcagccctaccattcctacagaaaggcaccccaagaggttctgcttcctgtgcattctgtggtcactgtgccattcaggtcgcagctggggcctcccaggctctaggagggtttcctggaccgcaccactgttgggtgcaggggaagattccccttctccttaccggacttgcccaggagaggtaggtcaggaacccctgcctgaaaaagacacacaagtcagtggctgtgcaatgctcctgctacacacagaggtggcaggccttagaggggaaccctaggctgtgttcactctcccaggctccactttggaaaagccagggtctgctctcagctcccacattccgccaaagtctggggtttcagtgccaaacaggccaccaaccctcgaactctgcctgaggtggaggacaagggcaaacccctcttgctcctgccctccaaccagtcacatattcttccaggcctttcatctcaaaatccaagatgtgaccattgtttccgtgccacctctgccacaggtagtgaatgccgcagctcaaatgtgcggcaggttgtgtggtcacaggaaataacagaaggagccccggttaatatctcagttgtatgtggcctcatttttgcaggccctgtcccagagtcagtcctcagcacgagggcagctgagactcttttctcccccattccttcctccttccctcttcctgggtttcttcctttttcaggctccaattgcagcagcagcaatgctgggagcggagatcctgggagcccggagccagctctgacatgttcagcgggccgtgcagggtcaggggcatgctcatcggctcatcactggcatgattactaatcatcaggcagcggcagggttactgttccctcctcccctccctgctcacttcctcagggtcttcaggctgcaggagccgaagagggaaagaccctgcgtgcaccctggcaggctgataatcacagctgcagcccccaggcactaaaaggatgggtgggagcatcatccaccactcaaagggctggggacccttgtccctcccatgtgcatccatctctcctatctctgagtccccagtgaactgctgcctccctagagaaacagtgctagaagtcagtggcaagagcagcaggaggacttggagctacatgcagagtgtgagctccggagtcagaccagctgagttcaaggccagctccaccatctattcactgtgacttcaggaaggttgcttaacctctctgtgccttagctgcctcatctataaaacaggaaacaatgagagtctttccttatggggctattgaaatgattaagtgagatcaggcatgtgatggcacacagtaagaactccataaacagaggtcaccactgctaatgcaattattctatcacctcaggagactaaagcaggggaggaaacaccattgactcctggacatttacccaaggagattatggatccatgttttgcacacactttagaaagacaaggaattctaaccacagcatctgtctccactgcccccgtcatttcagtctcacccgtccaccctcaacctcaccactgtggcccggaaatgcggttgcccagggccactctcaccccacctcagccctgctctgctcaagtctcacttccactccttccagctcccatccctttctacccagctccaccctgatttctccaccatgacctttaccctcctagtctgatctagacccctgatcttgccgagtatctaggactttggtgcctttgaccctcagcagcagaggtagagagggatctcggtgaagtctgggatgttatagtgacttgtttatctaagtgccctgagactgtgagttccctaatgcagggagcatcaacctctgcagagagccccagagccctgctcaggtgtgatgaacaggaggcactcacttgatgccctcacaaagttgtgagtgaatgaatgaatgagtgaatgaatgattgaatgaagattagtgattatgttaatgacctgcctttttcatgagccttgcaacctcccaggtaccacactaaagcacttaaatgcttccactcatttaatcctcatagcaaccctaagacataggcgtaattattgtacctattttatagatgttgaaactgaggatcagtgaagttaaaggcacacagctaagggatgaatggataaaatcctttaccataacctttcctccttaggacaaagtttcttcaccaactgtccaaggctgtgtttcactggggagagtctgaaattctacaccaagcatgagcatgtgttcatgcagcatggtaactctgggggaaaaggttcacaggttttatcagatacttacagtttgttagaacatatttgaatccatccatctaaccacccgtcccctttcaatccacccttctgtccacccccagacagccatttgatcaatattcatgaaatatctgccttgcgccaagcatagtgctggcacccatgaattccctggtctccagaaatatccttccccctctccctgactacccctgcccccgcctcaccacacacacactccttgcaggatctgggtaactgggagggctttaccgccagtgtcccagctgcgtgggtggctgcactctgtctgaactcatctcagctctggtggagactgtggcagcgcagaagcgtgcagggggaatcctcaggcagcgcagccatcaggacatgaagggcagagcctgtgccccggcttccccggcttccgctgcagtctacatcagtcctgctccctccagaacatgatcaaccgggacagatgaggccatgcttgatgcataaggatgcagccagggagagctgcctcccaaacccaagtcctattcaaaggtcttttcttcctcctggggaggtaggggagaaggtccaagcaaagggaactggaaggggaaagtgaggcatggagtttgtgttttctgaatcaggactgtgttccagccagggagaccctgtgtcaggcacttttgtaatcacgatcactttcagcctcaccctgcgacctccaacgacattgctgagattgttctccttgcaaacatgaggaaattgaggggctcaaaggtcaaataacttgcccaaagtcacaaaacaaatccgggactttaagcctgatctgcttgacctgaaactcatatctacttccctgccctctgaagatctatatgtcctatgtcatcacttcactgttcacacaaggtgatacctggcttctccaagcacctgctaccctgaacttactgcaccactctttccttcctagcctgaatgcaatttgcaatgaggagatgatttgattttcttcagccctagacctccagcttcctgagagcaggtactcttgcctcttcttgctcattattgatccatatatttagaatagcgcctggcaggtagatggtgcttaataaatattcattgaataaatgaatgaatgaatgatccaatgagccccaaagcaaataacaataaaggacatttgcagagtgctctacagagagacaagtgctttccctttactttatcttaccccattctcacaacaatcccctgacatgattgggttcatgtttcacagatgaggaggctaacggccaggtgtacataccaggggacatgggactgggttcatatgagctcaggggtaaatgatgacaccctttcccctgccctgaaggatctcagtttgagtatttgtagcacacttaggatgttctgggccaggctgagtggcggtggatgggggcggtggaggtggggtatgcaaagcaggaaactcggcctttgctttctaaaagctcccagtctatttgaggccagacttatgcatgcagaacatttgggaaatggtacaagacagcagcaagcatagtgctgaattgcacataatcaggtgccaactgcattcccttccttaactaatctgagtcttttaataccagatggggaccctgagaatagatttcctatcaaacagatgaagagcaaagatgggagccgagggaaatgctgtggcttactcatttttatacccctgtaacccagcatgatgtctggcccacagcaacaggaatagggcagtccaccttcaataatgggccactctatgtgccaggcacctgctaagggccccacaaacatcatgtcaccaatccctcacagcaacactaccacttactaaaggaattatgaaagtaatccacaagaagctgaaagcagggttcagagatcgtactcatcatgcccacagtctcagagtaaaggggcaagctcagtgtttgaacccaattctagcagcctcccaaattaatgctctcaatctgactctatgctacctctgtgcctggaaggaactactgttgtccataaggatgagaagaaacatggctaagggagcactgagtagggaggaaggaggcagcagggaggaagaaataaattaagaaagaaagagatacaaagaggaagaaaggagagggggagggagggaaagaacagggcttgtgtgttacataaactcagacaagcacatgcatgttttaacaggattcctgcaggtctgacaatctcactccttcctccctgaacaaccttagaggggttgcctaaggagtcctatatagaggcttatggcagaaggaaggccttgcgtccagaactttctgagctcatggattgacactggggttgcgcatcagtctgcttggaatgccttcaaaaaataccccagtctgggtggcttatacaacagaaatctattttctcatggttctgaaaactggaagtccaagatcaaggtgccagcagggttggtgtctggtgaggcctctcaccttgtgttgcaactgccttttccctgtgtgctcacatggtatctttgtgcgtggggggtctttggagtctctccttgtaaggacactaactctatcagatcagggccccacccttatgacctcttttaaccttcattagttccttagaggtcccttcttcaaatacagccatacaggggcttagagcttcaacacagggattttggagggacacaaacattcagtccacaccggggtgcatgagggaggggtcagagctggagaaagtgcatgagctagttcaccttccagagtaaagggagcaacagccactgaagctcaggttggatggggctggcaaggtcgctgtattgagtacatcatgggagggacaacaggacaaatggctcctgcagtcagggtgactgatgggaggcttcttcagcactccctctgcacattcattttgtcactccctctctccccatgcagttctttgctctctgttgcaagttcccaggaggcaggcagagggcctgttatcatcatctttctctcttgcccctcacacttacctgtgttcttctacttagacacattctttgtgagcatctcatgggtgatgttggctgcattgtacagtgggcacgtgcgtatgtgtgtgtatttatctgcaaataatacccatgtcacaaggcgtccgcaggaataaatgagctattgtgcatgtaaatatctggtacatggtagatacatgaatgaatgaatatttgttgaataaataagtgaatgaatgaatcttcacttggcagagcatgtgtcttcctttaaggggcaaggatgatctggtaatcatcagtttctgcttactaactgggtcactgagcaaagaaaagagactcactcattcatttattcagcataggttggctgcacccctgtcagaaaccggaggttaagcagaaagtagagagttaaatcagtatgtaaagcagttaaaacagtccagagggagagacaggcaaggaaaggaacaatgagaaacaaagtaaggagtgctctgataagaagccctgggtgctatggaaaccacaagcagggcaccgactcagggccagggagggatccctggaggagatgacatctgcagtagatattccagggtaagcagcaggtggccagaaggagaaagaggtgaggaacattccaggcaaggggaacagcacgtgcaaaggccctgaaggagaaccacaacacgcatctgagaaatagtgaggggtctgggtggctgagccacaaagggaacaccaggggtcagggaggatttgtagaagaagccacaggccacaaaaaagacctcataattcatgttcaatggtttggattttattttggtgacttcactttatacctactgttcagaggcagccaattgcaaacacgtccagaagcactttgctatttctgatctgcaaaatggagcaagtcatctgtactctgcttcttcagtgggttgtggggaagcagaaatgagaggatgacattctagccttttgtgacctctcaagtgctgtccttatggtcattcaggtaccatgaaaattagcagagccccaagggggaagtagcttggtgctcacccagtggtatccctgacaagttggcaaagacacccagggtggcttaactttctcctcagcaaagagctctcctctgttccctgaatcctggatatcccactgggtcctctagtgaccccaagcttcagcctcgcatgccctcttctcgaacagagaaggcaggagggaagcagggaccagcccctgctccatcttccaggattccaggcctccctggcctggacaagccctgagctggcagttaggagagcagaggttgtgaatctggtgggacccccagcaggtctttctggctcagtgccctcatctgtgagcaggggttccccaggagaccacgacagaggcctggaacccaagttctaatcccacatcctggctgggcaacttcaggcaaatttctaacacaaggtaagcctcaatttctctctggggtaatgatcaggcacctgcttaattcacaggggtttggtgggcatcacgtggacaatgtggttgcacagcagtgggcaatgcaaaggaaaggaagtatgttagtaagtgcccctcccctgttgcacaaaacaggacacatgctgggattgcagaaaagcaataaatgctgcacaggtgaagaaaactattcaaggaccctggccaagtcacaggctacctgtggccctgaggggacagctcatgggttggcattaggggaagcagctctcaaggggcctgtatcctggggattcaactctgtgcctatgtggcattgagcctgtgtgaatgtggtgactgtcatgctgttttgctgtgtgtgcgtctgcatgcctgtgtgtttgtgtgtctctccaccttcgtggggggcaactgtaggtgtattatgagccttgggtctgtctgtgtgtacaatagcaatgtctgtgcggacttaaggacctgcgcccatatgtttgtgggactttctgggcatgcatgcttgtttatgaggccatacatccgggtattctgtgaactgctagcatggtgtgtatctgtgtggcagacagaaaatggctgggtgggattgtagggggcagcttgggcaaaggatcctcagtgtcaatcaaaatgggtctcagtgggaacccaagcagctcagacttgggggaggggaagctcttcctccaccttccagggagcaaaccttgcaattcaacaccacaaggctttgagtccacaggcagggacgcaaactttgcccattgggtgagacgccactcacagaagggaaatggcttcctaaatctaatcattgccccttcaagcactaacaacccgtgcccaggagctgatggctaatgaattattgagctggaaagggagaagaggtagaaccaaggaggaaagaaacagaaaaatgagagagcaggccgggtggggtggctctcgcctgtaatctcagcactttgggaggccaaggcgggtggatcacctgaggtcaggagttcaagcccagccagcccaacatggcgaaaccccgtctctattaaaaaatacaaaaaaatttagctgggcctagtggtgggcgcctgtaatcccagctactccggaggctgaggcaggagaatcgcttgaatctgggaggcagaggttgcagtgagcagagatcgcaccactgcactccagcctgggcaacagagcgagactccgtctcaaaaaaaaaaaaaaaagaaaaagaaaaatgagagtgtaagggcccagaggggctgagggctcctttctcctccccaactccctgtcactagaaggtgggccctgccataggaggattctgcagaaccctcaaggacccgcggagcaggacggcaccttcttcccatgaccacccatttggatgtgtttttcacccctttctgggtggggcagactttccccctccccatgagttcaggcagtgggttaaataagatttcccttgaagtcgaatgaaatcacaatgcaccacacacagggacacacacacacacacacgcacgcacgcacatcacacacacacacacacacacacacacacacacacacacatacacacacacagtctccctggggccaatctactgccccctgaacctcacccatcagccaggtgcctggccccgggtctgtctcttagggttacatgctcccggggctcccgcacataccccggcagatgagggtgcgcaggggtgagggcgcagggctgggcgtcccccgcccccaccgtgcagccctcgcccccgccccgcccctccgtagttgcccgcccgccgccccctccgccgccccctccgccgctccgactctcgccccgagcgctggcagcaggcagcaggcagcaggcgggcgcgctgtggctccgcgccgcgcggtccgggctctgttcattcatgattggtactcggccctccgagacccagcccgagcgcagggaggggagccgagtgtgcggcaggaggggcgggcggacggcggctcccgcaccgcacgcggcgctggctcggcagcctcggccgggcggccgctctggccccgtgtccagtgccaggcaggcttcagggcaccgtcctcggccctgggcgagggaaccgccgggccgggtcctcgcgcggggaagcggttccgaaggctcgcggggagcggctagccctgagtccctgcatgtgcggggctgaagaaggaagccagaagcctcctagcctcgcctccacgcttgctgaataccaagctgcaggcgagctgccgggcgcttttctctcctccaattcagagtagacaaaccacggggatttctttccagggtaggggaggggccgggcccggggtcccaactcgcactcaagtcttcgctgccatgggggccgtcatgggcaccttctcatctctgcaaaccaaacaaaggcgaccctcgaaaggtaagccaccttcttccttttgttcccctgtctgggcttgggggtgctaggcgccgaggtgggctgtgccacctgcctcccttagtccggactctcctctccacgaggagcccggacaggtgcttgtatccaaaggagagagaaatcggcgggagggctggtgtgaacacccagaggagggagccggagtggacgtctgccccagcggcaactggacccctctggggcaccaggtgtcgggactctcctcctggggaaatctctgagagccgaaggaagcggcatgttcacaggtgggggtgaccggattctctggtggaagtgtggtgaagctcttcccattcccatgacagctggcgtttgagcactcagtgagggtgctgccacactcccacactcctcctaggcggctatgccaggtgcagacctgcgagtcccttcatcaggaagagtgctctgtctgcacccccaaaacctctgcaagccaaaaggaatcagctgctgccaggggtaaaactcccaggcctcatgtcctggtggctccgggagtcaggaggagcaaccgtgaagggctggctgcgagctgagcttacatcaaggattaaaaagcataatatcgtggagtctcttctgcctggacgctgttccttcaccacctgtccccagccgaggcatggctgatctcaccatccgtgggagagtcctcaaatgggtccaggtgaagttggaaccagtgtgttgggccctggaggacaatgcaggtctccttaccagcagttcaaaagttagtggttggaataaagagactggaagcagttaggaaacgggaaatgatgggttttgttttgtttaatgttcaaatgtcactacgagtggtaagattttaagcagcttgacacttaaacattcaaattctaccatcagagcccccatcctggatacaggtgggagttaagctcctaccctacaggcctgatagtgagtagaagtgtaatggggtaagggaccccaagtgaacaataagtctcctcttagaacttggttggtctcaccctgtttagaaccacagagatctccataagtaagctgtccttgaaaccccctggaagaaggggtcccagcttctggcccagctcccaggggcatcaggctggctgagccccgaggaaagagatctctgggtgcagatcttaggtgctgaagctgggttggcatttacatcctagaacataggaagaggctttggcccatttgtccagctgagttacatgtcctgctggcaaggaagggactggttgtcctgttaccagtcctgaccagaacaggtctgcaaagctcagcccaaggccttgacattctaagcctcacctctcacagatcctgggatgctgcttgactggggacaattttcagcgccaaatataggtcttctccctcatcatctgtctgaccaccatgcggtctcagaggccaggggactgtggggacaggaaagtcaggggcttgtttttaaatattttcaatgcctgtggctctcctgggagctgggtgtcacagaaagatctcaagccctagagtcaagtggagtctgggtgtgaatcccagctccatcactccctgcctctgggaccttaggaaagtcccccgcacctccctaagcctcagtttttcatccatgaaattcgtatgctacttcccggagggaagggtatgtaggaagtagaggaagggaagactctgcctcatatactgtgttggctgcagccaccagggacccagaggaagttgttgtaaggatgtgagaatcaaatgaatgatgaatagggagctccgtgcatagggctgggaaaagagtaagagctcagacattgctgtctaccatttccttctcctgccccaaacatccaggaattcaccctggatgaattcctgcaggattcccagagtacaaaggtctttgcttctgtctcctcggattctaagaaacagaagagggggtactggcattcagtgtgtccctactgtgtgcttgccataatgctcggtgttttatcaacaactctcatttaaccctcacaacaatgttcgtttgaggctcatagcaggttcggggccaatgggtggactcccaagacaagctatcgaagcactgggcactcagcccttcctgcacaaagcccactggcgtgagttgtccaggggtccagctgcatatgttcccccaggtatttgcccccgaagcacagtcatctcactgccttgcatagtggaatgctaatcagcagaagacccttctatgggaggcagcttggaaacctggaggaagccctggctgaggaggctagtggtcagggagcctatcctggccaggtcacttttccccactggggcctcggtttcttctttgtaaagggagaaacttacattaggcatttcctcaggttccatttggttctcaaattctaatatttttatggttgatgctctcaccagagctgctgctatgatctcagagacgtgaggctcagatctaattagaagcaaccggaagagagcagttgggatttttcaactcaggaatcagtctccctgctgggttcaaattcaggctctgccacttactagctgtatgactaagccttgttttcctcaactataaaacagagatagtagtagttaccatcttaaaatagctgttgtgttgtgtggatttcaaggatcatgcaagtcaagcatttagcacagtctctgctacataagtggtcagcaaatttgaggtactattcaatttatggctctattgtttggggcttccaaatgtccagagtaaggccattttcgaagtaggcagtacatctgagagccttaacagctcatttctggaaaccttatccagccctatccagataactaggaccaaaaaccccagcacacagatgctcgtcccttgcttcaaccctcactgacctctactctgtggcttgtcctgaaaacatcaaagcctgctcaattaaaatcctgaatgccttgataatacaatttagaaacatacatagtttttaaatagggcaaaaactctgcatgattagtgctgcaagaagatatccagcccaacctgggtgttcagggagcgctctctaaaggcaacagaaatctaaagtaatttaagagccatgccactgaataaaaatattcaggttcatttcctgtccttctctctgtttgggatctttgtgtgtctttaattaaaagtaggagagccctgcttttgggattcagcctctgcatcccagtcccagatagaatttctgactctagcagttttgcatgtgcatgacacaccaaggacactgctcctggccttgaatgggtaagtgagacaggctagggcattgaggagaaccagaggaggaccatacaggtgcagctgctgggcttgtcagcggggcaggagaatttagggacaacatcactagaccaaggccatctcaacagagaattgcctagaagcaaataatcccacactacaggggtggctgggttagaaatcctccatgaccgagtgcaagcatgcagaactttctgaaagggctgagcttcggatctccagaatagtcatagcataggtgagctatgactcaaccccatggctatcagatgctttttctaaggccacacggtgagttaatagggtactggttaatatagggccaaacatgggaatgttcccgatagtcccatatttgctcctagatcaatgagcacctcagggaacttatggaagcagagtgtacctgatgagactgggtttagggtttattggtcagggcagcattttcaacctaaagatatgggagagtgacaagagacagacaggcatagagaagcagtagccgtgttgtcacatagtcctgagcccaaggggcaggcctttggcaagtcatttcaccttgtaaatgctagtttctttatctgcaaaaggagaatcctgatgtatagaaatgtttgtgctttggtctttacccatctttgcatctttgcctgtccctttaattctataatgctctcccaccccaccccttgctgccttgtctaatagttaaaattccaccgacattccaagacctcactcagcaatttccatattcaggaagccttctccaagccccagagagaagtgatttctcccatctgaattcccatattcttttaaggtgtacattttcttatgactcacaatcgcgcttggaattagacaatcaacggaggtgttaaccccctttccccaccaccagaggtcagggttcttgggggtaggagctcgtctaactcatccttcacaactctctgcttggttctgtgcacatagtaggtacttaataaaaattttcctagagtaaactataaataatggaatggttggccactctccattatttgctagaattgcagaccctgcaggaaaagttagcttcccaccggaatttcagttaccagccctctgccaggaatgaattctgttgttcggtctgctggctttgaattgactttgtccatgaaatgtaccgaatctgtttaccatttagcaggaaagtgctgagaacagtgattctactcccactccctcataatcacaaaggtatgaggaacccacacccagcaccaggcacagttctggtccctcaatcccagaagaagctcaatggagctcaagataaacagaaagagagagatggaaaagaatggaagacagaggagaaggacttactgcctaaaatcagtgggattgttttgacttggtctctggaaaagggccaaggcttagacctctttgtctgcctggaagggccttgctccatgaatgctttgtaaatctgtaagtgaataagtgagcatatgctttaacaaataagtgaaaagatgaatgattgaatgaatgggggaagcagtaaaggagtgaatgaatgaagcaacaaatgaattatcaactgaatgacagaaagaatgatcgaataaatgaccacatgaatgaatgaatatgtccataaatgaatgaatgatgaagtgccagaacagctataattaacagcctatcttttcacaaagagcattgatagtcatctccccaaagttgaaaaatataaattcagtcaagaagagtcctggtaattttttggatactggtaggtgtatagtgtctttggagaaggtgaggagatgtctctaagttttcactcttttgctgaaacaaaagcagggactgactcacagtgattccccttgtcttcccttatatttcaggttcgttcacccttgcctgggtgagatcagaatctgtatatttatccactcatttatttgttcacttagccagtcccacaattgtccttcagcattgcttccctgcctaagatccactctggcttcctcatcctccctcttcctccatctcctcattcacctggccaactcctacttatctttcaaggcctcattcaatgccaccgctctgggaagcctttcctggcttctgtaggcagagcacatctctgccttctctctttccccatagctgctgctgcttcccttaactacaattctgaacacactatgaggttgtcattatgggtttacacatttatctctctgactagctttcaggcactgagtcttatcccagggcctctgtcaggcctgacactgcatccaggcttgatggatgctggcggcatggaggtaaggatggatgggccagagtgtgcgttcttgatggctctgagcggtgtgagaatgcggcggtgcagatgaggaatccaggtctgctcctggggagaagctctgcaaaattctgcataatggccgtggagctgatgttcccattcatcaggcagggaaggaacagtttttagaaaagagagagagagcctaagagtcctagggccttcagagaaacatctctttaaatgcttccccttcctccgggtagtattttaaataggtcaccttctggaagtagtggtagtcagttgggatattgctagcttcccgtaccccagccatgggagtagtactttggattaaatcttgttattcaaggccagactaaaagcctcattggtgcggtggggggaagtaggaaccacattccactcaaatcaggaagctagaagtaggattgcattatggctatgagcaccgcgttaaaataagagtcttgggattgaactccctttcattggttcatagctgagcctttccaggcctcagtttcctcttctataaaatggggacagtgggccaggtatggtggctcacatctgtaatcccagcagtttggaaggtcaaggtggacagatcacgaggtcaggagttcaagaccagcctggccaatatggtgaaaccccatctctactaaaaatacaaaaattagccgggcatggtggcatgctcctgtaatcccagtcactcaggaggctgaggcaggagaatcgcttgaaccgaggagacggaggttgcagtgagccaagactgcaccattgcactccagcctggatgacagagcgagactccgtctcaaaaaaaataaaaattaaaaaatggggacaatgacagtgtctccctatagggccacgtgagggccaagaaggaattgaacatggtgctgcacaccaggtgagttggcagtgctggctttgctgctgccttttgtcccatctcaggacaggccccttccttctgccttgctccacttggatgatgacggtgttacccttggtaatctccccatccctttgagctgtggcctctgattccagccctctgagatcccgagccaccatatccatggtcactggcattctaagcagtttctctggtgattcctaagggaagctgtcaactttagatggtaaaagcaattcccaacagtgaggtatgaaaatgcaggtcacccgccaggaaggataataatactagctcaaatgactctggcctccacccagtgccaggcaccttgctcggctctttcctgtgttattttattaaccccaaccctggaggacaagatgctattacagttctcattttgcagttgaggaacctgaggctctaaaaagggaagtgccttactaagggtcatagagcttgggaatcgcagagcctggttctggttgatcccagaccctgagcttctaactgccatactaacctcctctcctcctggctttgcctctggaaccttagggacctgagtagaaaaacagtcaaaacgggtgcatggatgttggggagaaggcattcaaggatagactgaagcacctcattagccacacggaacaactgagctacgtgcaggccctgagcaaaatgcttttagccccatcccaaccccgcctccccctagatctgtttccatttcatctgacactgtggaagcctgaatatgaaatgattgggggcagaaggccaattagcaaattcattaataggattaaacatctctcctctgctctaatcatttatgtgaactaaaattttctctctttgttatagccatcattgcctgtcagtgaagatagagtgtttaaatatcttccaagtatgttagaattgcaaacgttcagaaccagggaccaggatcagagttttcacacggtccaggtgggcaaggagatcagtcggtttacaagtggttatcactgctaagaaaaaaacacaagaacttgctagtacatttgcaagtaccttactgctcatctcctttctctccttagccacatgttggcccaaatcacctgcgtatgttatacggttgttatgagcatacactcctggttaggcagacctagaattcaaatcctggctctgcaactcattagctgtgtgacattgagcaggttacctcgcttctgtgaactttcatctctacataatctagaaaatgaaagtattgttgataattccctcccaggttgttatgaggattaaatgcagtcatgcatgtaagatgcagcggtcagcactcagaatgcgctaaaggtaaattgttactatctgggtctactccacttaaagtgtgctcctccaaccaacagcctcagcatcagttgggagcttgttagaaatacagagtcccggccaggcgcggtggctcacgcctgtaatcccagcactttgggaggccgaggctggcggatcatgaggtcaggagatagagaccatcccggctaacacggtgaaaccccgtctctactaaaaatacaaaaaaattagccaggcgtggtggcgggcgcgtgtagtcccagctactcgggaggttgaggcaggagaatggcgtgaacccaggaggtggagcttgcagtgagccgagatcgcgccactgcactccagcctgggcgacagagcgagactccatcttggaaaaaaaaaaaaaacctcaactcagtgagacctacccagtcagaacctgcattttaacaagatcaccagatggtttatatgcccactggagtctgaggaatactggcctaaagtacagattatggaactatgtgtattgtattacacaaaattatatatcaagccagaagaggcttttgctaagacttctgatttaagcctcattttacaaataagaaaatagaatccagagaaggtgagtggtttgcccacaatcacacagctcaagtgttaggcctgacatccgaaccccagccctggtcatctcatataaattgttaagaagtcagatttccagatttgcatttctgcaatcaagcttgtctgtttttctttctctctctttctttttaacaacaaagaagtgcaggatgatgtacgcccattaagttttagtttactcattttaaatgttattccagccaacagagatcctgaatcttgactccaccagccatcatcttagctgtacctccaagttttctgctacctgaagaaatgataaggaggcattctaggtctttatctaagttgcttctaagaacatgggccagaacagggtgcaggacagagccatgtggactgcaactagagacttgcctgcataatggatttcactgataatgttcagaatcccagagcaggatggcagcctggtttacatacagagcctttgtgtgggatttgaagccagaaaatgtgactaaagtaggagtctaaacagacacaggtagggcctggggaatgaaagtcaaatgccttttccagggggtctagtaggacctctctgttggtggggatcccccaaaaaagtaatctttttatttttgtaggagtcctgtaatggtttcattattattctcactttgcagagtaggaaacgtagatgcagggaggttcttgattggctagtgattagtaagcaaggacttgaagtggatctgattgcgaggcactccaccacctgggctcctgcctgcagctggagggcatatccaggacaagcaagcctctgagccccaggaagaggctgagcagttacagctagtttcccaactcccaggaactgaaaatgacagcctcctcttggccccatcagctcctcacccatgccaaccctggacccagagtgagggatgttctggtggagaccatgaagctcccagctgcctgggggaagctggcacatttgcatccgtgtggctgaggctgcactttctctccatctctgggattcgcccatgtatgactctcccagatgtccaaattgtgcactcagcaggggtgtcttcaggaggcttccccacccatcgaaatcagggcagcaaggggctccccttgtcttcttccctctttgcatacatccagccctgggctgattaggactctaagccctgtaggccctgacactaaaataatcaggtcctcccaccactgccccgccctgcctcaccccaccaagggctacacaggcatttcaaaggagaaacagtaaaataagtttaaggaagtctgccaaatttggatttttcccatgttgactactttagtgacttttctgaaataaaatgtgctttcaaaacacaatttttgatgcctctactttgctagtgctttaagcatctcttgagtgtgcctgtgaggtatttcagcattggagttggaaccagacaggaaaaggaaagaaaccgatctgtatcgggcacctgctgcatgccaaggactgtgcaaggtgttgacaaaataacaacagtaacaaacataacatttaaatcgtccttgtgacatttatatagcaatctgtgccaagtaccactctaagcgctttcggtacattaagctaatttaatcctcacaacaaccctatgtggtaggtagtgtgattattcccatgtaacagatgaaatctcacactatgagagacaggcactgatccccctattttatagatgaggaaactgaggcttgggaagaagtgacttgcccaagtgccccgatgcctggtggaagaacagtgttcacaccagctttggccacttccaaagcccttgatgttgacactccaaatgcaggcctcactcatttcctagaagcgccttatgatttgatatgtcctcagggtgcattataagaggagggaggaaaacctgggactacaatgagcattgaatcttgtcctgatcttctcagggaccctctgtcattcccgattgcctattgcatctgttctcacctggtactaccattccctcctccctggtttttcccttgctaagtgaccactctatacgttggtccatatcatgtagcctctgctggaggcaagtctggttcccatctgccttcccctgaagaagaagctgctggaaaattagagttatgttggacacagtctttgtccccaaggaacttctctctggtcataatcattatattaacagcaaacctatagcatgctatgtgctagacactttagcaacttggttttatgtaagccttacagtatccccaggaagtgagcactattactagaccctttccagatgaggacactgaagactagagggcataagcaaatgtccaatgtctcacttctcataagtggaaaagccaggattcgaacccagatggtttgcctccagtgcctgcatgctgaatcactggactaggctggacctgagcatttagaggacattatagattatgtaacactgtggggattcagaggatggagaaagcacctctatctgaggggcaggggctggagaattagagaagatggccgaaagaggcggcattagagctcaacaaaagagctaggggttggcccaggcaagaatgtaggttagtgaagttctaggcagaaggaacaggataagcaaagtcacagaggcaggcaacaagaaggggaaagaaatgaaaactgacagtgatgttttgtatgcttgtgacttggaggatgttaacagaaagaggatgccatcagaagtgggaggcaaggagcagagtcaggctgtccatgttcaggagaatgggacaaggtcctaggaggtagtagacagcaaggatgaggaaagcaccaagcaagtagggatcgagactgtgccctctcagcaccacccttgtccccctaagtgtctccccgtgatcactgcagcttacatttgattcctccttctcctctcccagggaacttactatttgtccccatgatttagcctttgattaccttgaactgttctatcatcattccctgtaaacacgcttgactctccagcaagagtgacctttcctcagagacctggacctttctttcttcccttctcagcatcttcgagcatcccaggacagtactgggcaaaagactggtacttggtgacttgaactgatatttcacagagatgcacaaagacttgggattccttaattagaattcatgcggcagagaaacttgggcatgactttgaggatctcccccacccgccaacagcatattcacaagatacgaacatcaaagattgtggcttggtgtgaaaacatagcacattggaggccattccataacagcttagagctgatgaagagaaaaagatatggtgtgttgggtgaaatagaactgaaggccagtcctagcttaccgtttaggagctgtgtggtttgaagaaattgtttagcccctttctgcatatcagcttcttcatctgttaaacaataacaatcatggtatcaattcattggattgtcatgaggattagtgagataatatgaatgtgtttagtaagctataaggcagtgcatacgtggtggggatcagtattagatgacaataatggtcatagcaataataatgattttgatagtggtggtgatgatgtttgtgatggtggtgtgatggtggtgatggggatggtgttattcgtggtggtaattattatattatggatgtgtgagtctgttttcacactgctgtaaagaactacctgagactgggtaatttatgaagaaaagaggcttaactgactcacagttctacaggctttccaggaggcatggctggggaggcctcaggaaacttacaactgtggcagaaggctaaaggggaagcaggcatattttcacatagtggtaggacagagagagagcaaaggggggtgtgctacatacttttaaacaaccagatttcatgagaactccctcactatcacaagaacagcttgggggaaactgcccccatgatctggtcacctcccaccttgtccctcccccaacattattaactacagttcaacatgggatttgggtgaggacatagaggcaaaccatatcaagggataatattgttgatgatggcagaggtgttggtgacagtaatgacagtaggggcttcatggcaataatgatgatgatgatggaggattacaatattagtggtaatggtgattattatagtataggtgatgttgattataagggtggtggtggtggtgacaatggtgatggtggtagtgatggtgatgatgatgataatagtaatgatggtgatatggtagtatgacagcgatggtggtatggtggtggtggtgatgatagtgacggtggtgatgatggtgatggtgatggtagtagtgatggtggtgattatggaggtggtgatggtgataatggtaatgatggtagtgatggtggtggtggtagtgatgatggtgaagtgatagtgatggtggtggttatggaggtggtgatggtgataatggtaatgatggtagtgatggtggtggtggtagtgatgatggtgaagtgatagtgatggtagtggttatggaggcggtgatggtgataatggtaatgatggtagtgacggtggtggtggtagtgatgatggtgaagtgatagtgatggtggtggttatggaggtggtggtgacgatagtgatggtggtgatgataatagtaatgatggtggtgtggtcataatgatagtgatggtggtggtgtggtggtagtgatagttgtgatgaaaggtggtgatggtggcagtggtgatgatagcagtagggctgatggtggtgacagtggtgattatatagtgatgtaagtagtagtgttgttggaaggatgatagtggtagtggtgtcaacagcactggtgaatttaaggcaatcattccctttgtccaaactatcttctttgactaggctgcacagaaggatttccaacccccagaacttgaattcccccaggtgtatttgtcaaaagtaggaaagaataagacaaatcagcccatgccttcagatttcttctcttattcctggttggtactttcagaatcattttaatgtaagctgctttcttgacatttgcattccagcacgtggcacagtgccatggctggtacatcgtcaagtcttcaataaatatttgtgaaatgaagggatgaacttgcagaaagacacaggctgttctcttggatgaactcatcagagttaaatgtttcatctttgaagataacgcgggggttatcaggcacatcagaatatacctgcattaacactattgccagcatgagcaattcgataacctggcaggttgggaagatttcttggcacctacactgcccctggaagcccccggatgtcagcttggcctggcccttgtacccaccactttgccctcagaggtagggtctgttctactgggattctgtgctaactgatcacagggaacagtggggaaaatggcctctcccaccggctgcttctggagagtccaagcctccctcctcagtgaccttgctgtgcggcaggaatgagaggcacatcctggctctggagatgttcttcttggcagcaagtcctccccaatggcaggagggattacagaagtgatttcaggtgccagtgcctccacagcccacccaccctctgctctaggcaagtcagaggcacctgtagagcctctgttctttgtgtgtggaaaaggaataatctcgcaccagcattataaggttctcatggtttttaggggtgtggcatatagtgagggctccgctaatggcagcagctattaatattggtatcatttattatttccattactagtggagacattgagctgatatatgggtcaataatgatagactagagactttgtgtgtctctttggtggaacatgtgtggcttggattcaccttgaatcccctgattctggcactctggcctgagagtgtcctctgaatgagtcatgtggtgccagcggggttgttgagatagatagatggcctgcaggcatttgggttcaaatgctgttctgctgaataaggaatacgatttggggaccaaacacccttggatttaaatcccagacttgtttttccctggtggtgtggccctagggaagtatttctgctgagccttactgtcttcttgtgtccagtaaggttagtaatattgaccacattggctctttgggaagaggatggaaaataaagtgtaaatggagcgagggagggaatttgtctccgaggcagcacaggacaggaggtaatggaaagaccaaagtggtttttggattagagctgcctgcagcctttatctgtctatggagttgatttattattctcccaaatcttggaacaaagtcaagaaagggaggaaggaagggagagagatgggtaataagagtatggaagaaaatgtaaacatgtagagtgcagacagcggctgcctgcccatagcaagccctccgcagagggagaattaattggctgttgtcatttgtattgttgtgattgttcttattgttgaaagatgtagaagagaaatcaggtagaaagaattcaagcaaagacagggggtgagcgaaagcatgaagaaatgaacagaatctgggctgaatttctttaaggttataaagcactctatgcaatctgaggcaggcagtccccaagcttctagtaccaccctgcgactctacgtgtcaaacaggaggagttccttaaagggtgtttggtgtgtgcatgtgtgtagagggatgaagcatgtatacctctttgtatacatcagacactgtgctgggcactgcccttaaattatctcacttaattgtcacacagtcctatgaagcagatgctgttattgtctcagttttagagacaagaaaactgaagctcagagaaaagaagtgatgaccagcccaaggtcacatagctgctaagtgcagggacagcatcagaacccaggcccgtctgtgcccttaggtctcagagattctacacctactacctagtattagctcaatctgacccttggggaaattaagccccaggaaagctgtttccttcagttgcgcagccaacttgaagcaatggtagactgaatcccagttctgactgccagctccacagtccctccctggggcctcgcacatcattggaactgacaacacaagaatcttccatctccttccttctcttcctccttttcttggctgtcatccaaaactttaggggaatgcattataaaccaacttgagagacagagaaaggctgtaggaagatccaactcaaaaacattttggtgtttgctttacctccgcctgagcgtccctggagataaaccctcctcactctcgcccaccattgctctgctatgtcaatttcagcagccggactctggggctgacatgcattgccccttctcaacccagacaccacttccttcagggaaggctccacataatggtgaagtgcacagactcagaagccgggcagtgctgttcagaacctggttctgcctttctcgggcgtgtggccttggataagtcatctactctctatgagcctcagatccttcgtctgcaaaacagagctaatgcctcccttcttgggttgctgtggggcttaattgagaaggtatatgtgaaatgcctgctccataatagacacccgtttgagaattaacgtttgggttgttacagtgtgagcccatgggtctcaggcaacagacttgataaatacaggttcctctgcaaccacaatcctagtccttagcacaagcatgacactgcctggcatgtgctatccctcccatatccatcagccatggcagacacagatccctcattatgagacttttttattctgagctagaatgtgacctcagaatctttcttaacacaatgcttcaagcagtcactaccagttgaacatagttgacatggaagatagatgaagtttatttgcattctagttctcaccaagtccatgttcactgctccatctgctcagtgcaggctgtctctctgctctgtctcccacctgcttttgtgagtgtatgtttctatgtttgtgtatatgtgtgtttaaactcctcttccagagtgaaagaccatttcagtcttttgtgtgctgatttgtagaaatcattgaactttcagaatcccatttgcaatgtcatgtctgtggctggggatctccaagtaacatcagcttacgtctgggaaggacaaggggaatcaaagttagaagtcaggagagcaaaatccacacacagcatgcaccatcggccacctttaggagtgacacaagagatggtgtttgaatataaatttgaagtctttccaaagatttaacactcctttggctgacaaccataatctcaaggaggtaggcctaggctagagcaattatactttagggtaaccctagctgctataacaaataaaccccaatattgcagtaggctgaaacatagaattgtttttatcattcatataacttcttgatgggccagtagccttcttccatgtagtcactcagggacctagcctccttccatcttgttgctcccccaaccctaaggcatcctctacatctaggtgaaaggggagcagaaaatgtggtctctggcccaggaacaactctagtcttggagaagcacatgatatagtatggagatcacagccaggcctgccaccggcagcaattcagggctgggcaccagatcagctgggtggagtcccagctggccaaggagtctgagcccaggtactatgtggtcatcttgggcatggaacagggcagctcaaggaccagaggtcagctggcagggtccgcaccaagcctatccagggaagccctgccctgatcatggacaaggcctgtgtaatcctgatgtcagctgcttccctcccgaggacagcctgcagcagatggtcagagcctgttgccattaaacatttgagtggttccaccagcatcccgatgagtctgggttcaccaagaaacattattgtaatgtgctccccaggcagctctgcctcagggagagacaatgccaggcatgacaacttcagcattcttgttctgcatggcagttgcatttctcattgtggtttatatgttggtcacatgatctgagctaatgggagtattcgcctgacagatgagtcccttttgctgggtgtgccagcaaaatcaggcttccaagcccccaaggctcactgccagaggctggggaattcgccaaggtaaatgccaccttgtgaggtctttgggacacagccagcagcctccccagggcaccattcctgtctcagcatgaggcttctctggccagcccaatggcatttgggagccacatccacaccccacgggtctgggtctgtttccagctgcactgggacattctggcagattctccctgatctctgtaaggaagagtacagcaggaaggagaggaagcagaaaaaaattccaatgcttagagttttccctctaaagaggacctcctgagccacttctgaacaggacttggaacaaaggaatcttggcgctttgatgatcgtgtctgcagcagttgttgaaatgagtctgacactcgccagtgccttagtaggaattataattacatcaggagaccccaggcaaccaagtaaactgattagctactgctccgagttgatagatttttttctctctaggtcataaatagggctgtgggagatggtggaagcatgctggtgggaacaggtcgagatgggctgtacattcaggaagcccaaccaagtggtgtgggcagctccccctgccccaccctgccaccggaagagacagtctgacaggtgcccaaggtagagttcagttccctcggccagggactgcactcctgatcttgcgtgctgcagagagctgtcctcagagcaggctgagggtggctgaactgctaggcgatgctctgggaagccctccgccaggaaagccgatgctttctgccaggcataattattgcatggataattacacgattcagagcctgctggagaatcctgggctggtgccagagtagaaaggcagggttccggaactgcagccagtggctgattctcagagtcgactttgaaagaagagggtaatcattcctcctcctaagactcctacctggctgggccaggacatggcaaacgtaaagctaagggaggcggggagttgatgagttctctcctccacccactcccttacaggagggggtccccagagttctgacctaatccctcttctttactccctgcacgtgtcacctccctgggacaatccacccctgcccattagcacatatatgcggatgacaccaagtgtctttccagccaggcatctgcaaatgcatgctgggcatctccctcacgtgtctcctccagcccattgcactccagcctgagccattctcctcctaccccagtctgcctctcagtccatattctcttcccagccagacatacctaacctcccagacctccactaggaacccaggagtcctaacctgctagtcctttcccactccctgtgcaccatccgaagccaggtcatgtcagttctacagcagatgtgtcttggctcctgcctgttctcccagcaccaccccccagtcctccggcacagcccaggtctgggctccatggtctgccctggctttcttgtggtggcctcctccctggcctccccaccctcatcccctggggaccagcctcccactgcctccagatccaatgtcttccagtaaatctgtctacacattcccaaggttggagtccttccatggtttccttcactctcagcaccaacttggccccttctgactgtcctgaagacccttcccaagctgccaacgctccagcactgcatcccctgccctgcttgtgacacccaaccctatcagatgccacatgcacttctcccagttgtccaatgtggctttgccaagcctgagcatacatgtgtggaagggaggaatgcaagggtgaatgttctggactctggagctacactgtgtgggtttcaatcttagctctgtcacttgctagctgtgtgacccaggacaagtcacttggcccctctgttattctttcttcccatctataatgtagaaataatagtaataacagaacccatccatggggttgttgggaggattcaatgacatattcatgtaaaagactcagagcatgaccagtgcacagtggccatcttatcaagtgcctgctgcctgtcccaagatggaaacacaaaatgtgaaatccaagtgtgggtggtggaggggtggtatggggcggggcgggaattcagtttaaactagttcatgccttcattttacagagggagaaacaggtcctgagagaggagggaccttacccatggccaccccaggacccagcccagtgttcttggttctgaggcccggctgccctggcatggagcagacagctccctctgggtggtcaagttccctgagttctttgagggctgactagtggtgagagggattcctccccaccaaacccctgactctgagaagtgggttggagcaggagaagaaaagtgtgcaactcagctcagctttccagggtaaaccgatgagaggacatttgacggtggcagcgttaggaggggacttctgcacaaggccggggaaactttgcctaagatttaggccctgggctcagcctgatgcaccccatttactgggtgcctgctctgagaccaggatacgtggaaagaacccacgcctgggagccagctgtcctgggctttggaaatagctgtgtccgtaggtgagaccttgtctctgcaggcctctagcagaggggctaagagcatgcgctctgcaggctgcctgggtcctcacccctactcccgcacttagtagcccttggtgacttaaccttcctgagcctcagttttctcttctgtaaatggaagatcataatgatacctgccccatagagttgtgtggataagcgatagaatctgcattaaagcatttaggtagtgcctgagatttagcaaaggctcaatcaacatttaaaaatggcaagaaccaagcactatcatgcaggtagggcacccatctttgtgcataatccctttgccttccctccctagaatgcagaggaaggaagacctctgtgagaaccctacatacatctttgccaattggcagtttttcctctagttaatttgggagcctgtgacctttaccgccgtgtgattctctgactcagactgcagtgttgcagtgccagccaaacatggtgacaagccccttcccaggcaactgaggacaggcaggagtgttctggaatcttctcctggagtgggagtaagggtgggcagagccatgtgatgctgcactgtccacctggttgaaggaagtaattccagactctgtctctgacatctctattagccaagggtgagggtgttagttcgggtcatgttagctgcgcctcccaccctgcatcctgggcccagaaaccacacccctgtgcagggcttctgtgtcagagtcaccagggaaatgggctgctgaggatgccagcaccaaccaggctgctgtcctggggcgacatgtctgccatcttacaacctcccttccaatattcaccatgtgccagctccagctcagtcactgagcctcacatcgctggaccccactgtgtgctcagggtcatcaggcactttcgcctgtggctgggattgagacctggctcctccaccttgcacttgtgtgacctggccatgctcatgtcaccctcctgggcaccccaataccctcatttgtaaagttcaacctacatgctgtgactgtgaagtgagaaagcagtcagcagtgcttagaacagtgcctggctcctactacacactcaataatgccagctatgttgtcaatatcaactctacgcagtagcccatttctgtagatgaagaaagggaggctacaggaagggaaggcatgtgcctggggtggattcgaactcaggcctgtcgggttccagtctgggcttttctgctctttccaggccatattggaactgccattagagggactcattcattcccatacatgtcaaatatgcactgcacccagattacatccatctttaattgaagacctatccttctgggctttggagatttgctggacttggggagtcaccaatacaactcaggtagtgacatctgggaggagaagactgaggtgtcatcagctgcttcttatccccctgcctttgctcagcctgtccccactgatgggacacctttgcccaacctctcacccataccttttatctgattagctttttttttttttttttttttgagacagaatcgcgctctgttgcccaggctggaatgcagtggcgcgatctcagctcagggcaacctccacctaccaggttccagtgattctcctgcctcagcctcccaagtagctgggattacaggtgcctgccaccacacccggctaatttttgtatttttagtagacatgggctttcaccatgttggccaggctggtcttgaattcctgacctcaggtgatctgcccacttctgcctcccaaagttctgggattacaggtgtgagccaccgcacccggcctgattagttgcttcttcctgtcctttgggacctggtacaggcatcaccttctctgggatgcttcccttgtccctccctcatcacaaggctggcttgggtgacctttctccatgctccaaaactcccttgctcctaagcagccccagcatggagctccaagccatgaagctctaatatcagagtccaagccttatagagcttccagggtctgacacatggcagaagttaaattaaactatgtatttgtttatttgctaacattctgccttattacaaaagagacttgagtcaactaagcaaataaatgtttgcagagctgaattaaactgagacagggtactggcccagtagaaaagtagaaaatacctgggcttgggcatcaggaagacctgggtgagaattctccagacctgtgccttctatggaacattaaaaaggtcactttccctctcaaagcctcagttagctcttcagggcctgcgaacggcaatctattgtgaggacctggtgtgtgagccaagtgcacccatcagccactcacagctgcagcagaaccaggcagttgagtttgacattggccttttaagctagtcacgaataatcagaagacccatggcaggctgtcactagtgattttgcttaggtacaaacttgaatggtgctccttggagttctgatgtgggagagtcactgagctggacgttagcacacacagttacacgctcacaggctcaccccagcatgcatgtctcaaaacaatatattttcctctatttgtccttgggttttcagttacagcaaaagtattttcaaaacaaaacaaaatgcatcatgatacaatctcatatcaagtaacattcatttggggggacgcacttaaattaatagtttcataagcggttgttgtcctgcatttacagacacacgacaattctgaaggggtcatgttatttttcgattatcctttactgcattttatgtgggacatggcatgctgcagtggtgtttgtgagctggaggatttgggagagccttaggaaccctcccaggagcctcaaggattgactgcagtaggagctcaaatgagttttgcctggggcctgccctggaggagacctgcctctcagcagccaatcccacccaggctgctctggaactggaggctctggctcactgggccctgctccccacccacttccctctcgcctctcccattcccttccccagtctgcagcccctttgttcaaggagggagctgcaagcgggtggtctctgggcagctggataactacttctaaagcctcttagaccctggtaatcttcctcctaacaccatcgggtgactgcaaagcactgcaggccagacttcagttctgctgtgtaatttgcaagctgggtgaccttccttatctatagaatgggctctcctgcatggctggcatgaggaataaacaaaatggttgtgtccagtgcctggggcatagcacagctcaaaaaacttagttcatcctcctgagggatcaagaagatacttggaaacaaatgtccaagggcgtaatcttgaaggggcttgtgccaggcatatatggagagaagggttttgtgggatgtcagacttaatagtgccctttactccccacccccgtctctctgttcatagacaggaaatctgtggcctattctgggacctcaaagtgccacagggttaaagataccaagtcagaaatctaaggttctaaatggactttagaccatttttcatttgggaaggaagaattctttaaggggttgtgctggcgctgtctctgtatgcatgtgcagaatgtgcttccagatggggtaatggtctgagtttgaggacagaagtccactccactgcattcaactgttcaatagtcctgggcagtgttattgcatgggagaccatacctaaccccaaagattgccccatagtctctttgtcagataaagcataagtgagcatcccatctttgttagtcagaaccttttcagtttcaaacaacagaaaaccaactcttcctgtttaaaggaagaaaaggggggtttattggttcatgtaataaaatggccagggtaagattaacttcaggcagagctgaatacaggtgctcaaagaaaatgtcgacaagaacctgttgatttctctgtctcagctctgctctcttctgtcttggcttcattctcaggaaatgctctaaccttggggttccaagagtagtcaccagcagccccatatttacagcccaccagctcagcaacctctgtgggaaagagcttctcaatagttccaggaaaagtcccagggctggctcccattggcctagatagggttctgtgttatgctgtgaggtgctggttctggggacggaggagtgttctgccttaacaaccgaatggactgtatttgtggggaggtgtgggaaaccaaggagctcttaccaggagaatggatgttgggccagcagaaacaaaatatgttactgccttcttcaagtacacaggtttctgtaaagcctaacatcacactgaggcaccacttgccccaaactccagcctgaaggattatgaggagttcgagcttgcctttgcagggcgcctgcttcctgttaggactgtgctcattgtacatggaccttcttctgaacctctgagattggttctgttatctttattcccattttacagatagccaaccacaaacttactgggtggagtaacagtgttgcccagagttagagcttataaatggcagagttggagtttggacctatattaaacagtctaacttcacagggcagactcttagccatcaagcaatatggtcttccccgagaatgtctccccacttcacccttccaggcctttcttcttgttggactctagactttaaatgcccttctttttacttcctgctcacttattaaactcttccttgaatgctcctcctcctgatagttttccccaggattaaatctgagcaagacccttttctacaagaccaaggtcaccatgccactgctgactacagctggtgtatttgtttgtcctaacccttggagggcagagactaaatttattgtttaccactctggcacctagtacactgcctggcacagagtaggtgctcatggctcataacatgtttattgattgtttagatggcaacacagataaaatcaaaacatggaaggttgctgagactcaaagacaggattattattgttggtaatgatctgatagctaatgagtattatattaataatagtcaacatgtcaggtactataatagaggctttgcgtaactgctccttttagtcctcccagtaatactatgatgctgatattactcttcccattttgtagataaagaaactgggagtcaaggaggtgaaatggctttcccaaagtcttgcatataatgtatccggactgcaaggatggggccctctggccccctcaacaccctatctgcctctcatacccagggacctgcccacaaggtcagccccttggcaatcttgccaaccttggggctcaaaattcagtttatggcttcccaagatctactggatgctttttctaagtttggagaattcatgacattatgaatcctttttccccaaggtgggtattcaaactcagagttccagccacgcttgcatccagggctcagatagcagagggacctgcctgaggcttgatttagaagggtccacctgaggatgtggatgaagcgtgaattcatttctggcaggggtggcagcagaggcagacagctctgtggaggcagaggtggggaaattctggtgtctccttcctagtgtggaccatcgcgcctgtgttgagcagtggagatagtggggtctttcctgcagaggcctccatggtagggctcaaacattgttctagctggggtggcctccaagcctaataccttgaccctcttcgagattctctgcactgccaaatatcttctaataaattccttctctgcataaaccaactagaatagattctgtagtttacaaccaagaatcctgactgaaaccccctgaagcttgtgggtttaggtatgaccatgtgggaaggcagcatgagctctggactataaagagaatcagttgaggatgtggcagcaaacaggtatactaggggatcaacgaggggaattattatgatgatgggcctttggaaacctctgccttctacagcagtactttgaaactcttgtgcacacagatcacctaaggatgttgttagcatgcaaattctgattcaggagtttggggctgggacctgggatcctgcatttccaatacccttctccacttaagttttgctgatgctggtagtctgaggaccaccaatgaggtggtgaggttccagggacgcttaagcctccagcaaaacatcacacaagacagaagtgcctacttcaattgcatgagataatgagaccaaatcatccccgggcaagcccaccactaacaattattcccatcattggtaacatcctaagtcctaaggtacctggagcttcaaatctcataattagcactcttgttatgccaagcctgctcctaatgaggacactttgataattcgctttgttgaagaaacaggatctgttcctttcccctacagtacagcatgataggagtgtggtttgctatttgtacctgtaactcagcccagggagtgctgacaatgggggagccactgcaggagtcccagcctccccacctcatgccccaccccctgtcctaagccccacccttcccagcaaaggaaagtaggcccctgaagcagttgtcctgtcctctagaatcctctagaatccagctacaaacatccaagtcctgcccccatcttcccgatctaactcacaccatttgtcatagtgacctggcctcagcctctttcaacttcttctctcactgccacacctttgcgtaggcagctctccagcctggaataccctcttatccatccggccaactcctccatgacctctgagatccatgtggaaggctctagaaagccttcctcaaatttcctttgttccaggatttaagctgacctaaatcctagagattagtacttcattttcaaacttttcatttgctcaaagcctacagcaaactcagtccacacacttggctatacaagaaaggttgctttctttgttgttctataactgactttaatttcaacttcaagtccccattcttgccaaggggtagaaatggaatcttggtcaacttaggttcccctccctactctctggggttgcatttccaggccaggcagtttctgctggtgcttttgttccttggtcctcagtcttctttctgtgttgacatccattgacatgtcctcgactcccctcatctcagatcacaggcccatgctgactccaggagtattcttgtattctcttcatctgaacctcaacactttttgagaccacgcatgcatgtgctctctctttctctctctctctaacacttctggaacactcttggacatgaggagatattggtctttctaggatggggtcaactggccctgcctcagatccattggcctgtacatatcttgtagccattgtggtgccatggatcacaggtcacgatgctgtgtggctgcctctgctcttagacctgccccccatgccaccagagggagtgtctgcctccccctgccctggacactcagctggaggggagggtcacagtccctcacagtcccttctccagtgacaagcaacaaactcccagtcttcctttctttctgatcctctcctcctcttcctccttctcctcttcctcctctcccagtccaaggaagttttatgcaaaggccagaggagggaataatgaggtggaggtctctctgaccaagcatgtagccttccggatctgttgtgctttccaggagtccttcaaagctctaagcttttggaattctgcaagctcaggaaattgaaaaccttttctctcacaactgcaggtctttgtctgcagttgtaaaagtctgtttagaaactcaggagacaagcagcatcttctttgttccctgctttctggaggcagtcagcgtggaacaccctgcctgcagtctgactcagggaaagggtcactgagtgtgtgtgtgtgtgttgaggggtggataataagcaaggagaacactcagacagagagctcacagaggggcaccccagcacctccctcacctctatattccccgcctgggcatagtggagggagggttaatgccagccaagtttaacaggcatttctgattcgcggcattgttgttgcgctatcctgcaatcctacgctgcgggtactgtttttatcctgatccttcagctctggaaactaatatagagagctgagtaacttgcttgaggccatgatgccaggatccacggtgcccccaggctgaagagccttaaccactgggctgtaccacctcacaggagggcaggtggcacagtgcctggaacttgggagggtccagcacgtggaactatgctctgtcatttacttactgtgtgtcactggatcagtcactcaacaccgctaagcctcattttccacctcttcaaaagggatctaataaacctgttagcagaaggctgctgtgaacactaaatgaggtggcttaggtgagagctctggtctgaagatgctcacactttgaatctcaagacttgtgtgaaccaatatcagatttctcctattagattgcaattctcagggagtcacattccgtctccaaatgcccatctcctgatccacaaaatgagcacaacatctctgataaacggtaactagatggttccagtgggcagcgggagtgggagggcggttgactgggccagaacctcaaatgtattcctgtgtagtttctcatgcattcattcagtttggcaccagaaggtgcccagactcactttgcagccagtctgtccccatagaggtgataaaggaaaaacatatgcacatttaaacttttaaaagtttatttgaacattcagcgattcacaaacggtatagcacagacagcaagcaactagcactcctctaggaggggccaaacaggatacttttataaagaggttgcagaagcaagacaaagaaaaccattttaatgggttggaatggaaagttcctaattagaggttcattggtggctcctgattggtgcagcttctagtttcaacttactgtttacattggtctgtggtttgtccccataggaacgtaaggtgtcagagccagctactcaggagaatgaggtgaaaggatcacctgagcagggtaggtggaggctgtggtaagcagtgattgcaccactgtactccaacgtgggcaacagagtgagacccttaaaaaaagaaggaagagagggagagggagaaggaggaggaggaggaggaggaggaggagaaggaggagaaggagaagaaggagaaggaggtggcagagctacagaagcacctgttgcccaggatggagtgcagtgatgtgaccacagctcactgcaaccttgatttcctgggctcaagtgattccccccacctcaacctcccaagtagctgggaccacaggcaggcaccaccatgcccagctaatttttttttattttttgtagaaatgggggtctcattatgttccccaggctggtcttgaactcctgggctcaagtgatcctcccaccagagcctctcaaagtgctgggattaccagcatgagctaccataccatgcccggcatagatttttttttttttttaacagaggctacagacaagactgactgcctggcctagagttgaggcccgggagacttgcctcctgtgtgcagcgggctgtgctggttgcctcggtttcccagagtctgatgaacatgtttcctccacaggcagtagctgcttcatttgtttttctcccagttttcatttctcattagctgctaaatcctccccatggctgcagaccctattgtagctgactcagccagtgggcacagcaggggctgggtcccagcgccgtctccgcaacctaggagaggtcaggggcagcagtgcctgcctggctctatctccaagtgtgcctcacccccactgacaggtcagattatccactgtccccagagacgttaggagggaggccgtgtcctccactcccctagctgacacactggaaggacgttctccttgacatctgacttaatgacagtggaaccaagcggggtgcccttgggtgaaggaaaaaggagggaagacttgagccttctttaatgtcaataccctgagcctgaggccacaagcaaaggccagcagcttctgcaggatagcagaagccaggagacagggaactggggagtgtacatttatttgcttctccaacaacaacaacaatatctaggtgtgcagtgagctcccacttctgctgatgtgggactagacaaaagatgagaggggaccaccctcagaggctccctcctgcttggccccaaactctttgtaaatccagcaccccacccccagttgttccccttcaggaatcatcaccctctgaaaacctgcagaaattctcaaatcccagccccctttgcttctcacacttgtagaggtctttccctaagcaaacacctgctttgattattcagggagtgagaattaatatcattgtaaatctaactcaaacataattaagaagttaaatctacttttgagggaaaaagttctgattgctcatctccagaccagataaataagatttcaaatctccaagatctgcagctcggtgtgaactgccctccgcctgtctcagccagaacatcaagtggaaaggggcctgaggaactgcctcctccagccccaccagtgtggagatgcagctcagtcttgccatctgtgaaatgggattgataatacctacatggttgtcttgagtttagctcataaccctttctccgccagaatatcaactccgtaaaggcaggattttgtttgttccccatagtatccccagtgcctcacacatggtaagcatttaataaaaacaaagccatcaatggagatgacgaaacccagagagcagcagtgccttgaccggggtcacacagcaagttagagcagagccctgattgaaaccaagggctcctgggccttaaactaggcgctccttgcattagcctgtggcaggagatgtaggtttgctgtcaatccttccaccagttactactgcctgtgcagccttgtgcatgaccttgctttccctgggcctcagttttcccagcagtagaatgggcttattattagaggagaagaccacatccactttggaaaacgggcagaaccttgtcccaccttcccccaacagctgaccattttctgcccaggctgtggccagaacctgttctctcccatcattaaaatccctctctccttctccaactctttctttctagctccaccctccccaaagaggaaacaaaggaaggcaaacatattcctgttaccagcccaggtctcagtgggccaaggtggagtgaggggagggaagaggctacagtcctcccactctgcccccacacacctgcagagacattaaggaaagcggagctaccctgggctgcctctctgtgatttaacgctctctcactcccacacctgcagtgcaccggagttaaaaatgaccttggcaaacagccttatgtattctctgtctagagcagaggacagagtcaaagaaaacccactcagaagcctggagagcggctgaaagtgggggagggcaggaaaggagggaggcaggatggaagcatgcatctcctgggcattagacttgctggattaaggagtggagagtcaaacatgggtagctctgctcagaaaaattattactgaaggagagattatgctccacaatctcaccagaatgtggctttgcaaagtgaaacgagggttcgttcctctgccagcacgaccaactctcccgggacaccccctcaggtccgtccttgtgccacaggccacctcacttcaggttggtggctcagagaggtagcagctcccatctaaatgtggcttctagaaccttctcttctcctgctgagaaaggattgtgctgagtagtagaagcagctggcagtggagtcccctggcctggttcctacaatcccaactttgacaattgtgtgacctcggacaagtcaccttacccatctaagcacatgttgttttaactgtaaaatgaggaaaatagcattcaactcagggtatgaatgagtggagccatgtggagcaacagttaagggcatggacttgggagtcaggcagccaaggtctgtgattctaggcaagtgatgtcaccactgagcctcagtttctccacctgtcatacaggcaggagtaaatgcctcctcaccccctttgttccttgtacaaacccttgccctggatgttctgtttgtcctcaggaccccctctccactgttggctggggaggctgacctgggaggactctgtgaatgaggcccctgccttccgacttcagctgttcatgacacaggcggagactgcgggcaggaggagagtgacacgaggtgtcaactcccaggctccctccctgagggttatagggcatggctctcttccatagctttctttgctcggccttttgttgatggttttcctcattcatcaaattggggtgctgagggcacccactgcttctgtcccagggcactgccctcttcgtgtgctttcccactctctccctacaccactgtacacagtccttttgttacacggccttccaattccccaatctgagggtgccattgtgtccagctgagaccctgaatgaagcaactgtcccgtctggccacagacctggcacaatttcccttcaggcacttaaagcaggagtaatgaacactgatgagttcagctcagtgctaatccctctacatgtgaaatctcagttcttcagagagccctgggaggaagctactacagcctttcccattttaaagatgagaaaactgaggctctgagaaggtttcacagccagagctaagcctagagcccttaatgactatcctcatgccctctccagtataggcaggaggctactgagtacacgtgcttgaacttccaaggcatgttctcaagtagaagtgtcctcctcacaactgctctgaggcacatgccatcggaaagctgggctaataattaaacaggggtgattttgtcagccccacatggcctgacaaagcagaaacacaatggatggtaaatattctattacgactgttattcccaaccccctttccaatggggtggtgagtaggaagcctccctatgaccagtttcttccccacagtcttgccagctcctgttcttctcatcacaccaggcttgtggccttgattttggaccctgttggaatgagggtcacaagagggtctgtctgtccacacacacagttgttcctcctccttcttccccacctccattcttacccattctcagtccttattccagactcctcccttgcaccagctgtgtccttggcctggggatgcataatgagacccagatgctgcccccaaaactctcagtttatggactgtccatcttgaagagatgaccacaggatgctcaatgctccagcaaagaggaatcctgtggttcaccaaaggcacacaggtctttggcacttagagaaatcatttgtcatatgttcctctaagtgccaaaggcctgtgtgcctgcagtcattcattaattgaaccaatattattcaatgagtccatttctggccactccttctcagctagccttctttatgagattttcctccactgacactccctgaactgctgctagccccagggctctgggctggctttctattcctccttctgggggtgtcattcattctcttggctttaaagaccatccatatgcaatctgcaggtcctatgatcatggcctccagaatctgtctcatttcgtccacatctcatcacctcctgttttctcactagcccaagccaaactcatctctagtctacactattgcagacatttcaggattgcctcattgccagcaaatttgcctcctacaagtcactattaattcatatgtcgggttgtcacttcctggttttacttcaggttttaataagcctgaagggaaacacttgttttcattccccagcatgaaactgggacatttcctctggtccttggagtgaaatccacactcccaaccacagacttcaaggccgcacctgctctgaccctgctgacctcccatctttcaccactggctgtggcttccttgcacttttgcaacaccaagctttttcctgctttcaacccccagacctgcccgtgggttgcaatttttgggcatccggatctcagcaaatgtgcctgctcctcagaaaggccttcctggccgttctgcctgaagaagcccctgtccacatcaagggtcttgcatctcatcaccctgttttattttccccatagcgctcatcccaacctaaagtatcttgtgaacgtgctgctggtctgttatccattgtcctcgctagacttcaagcccccgaagagcagggacctggcctgcctgttcaccattgtctctagcacctagaactcaggcctggtacaggataggtgctcaacaagttgttaaggacaaatgtcaagaagtacctgggggaagtgaggggctgaattggggggaataggttctttggttatggcccaaaaattgctagaagtttaaatgtgtcttctaagcccagctctctgtgttctcaaggtcgcaaatattaagaactcagggtaaataaaaatgtatcctttccagtgcctgcatgcccacactgaaatgagaaaagattttttaaataataataataaaggaacgatctttcaacctgcgtgcgggtctcagcggctccacttgcctgctgtgtggatctgaccagtgcactttcactgcctgggtctgggttcttctgatgtaaagtaaggctcccagtataagctgctttccttctagattccagggaaatcatctcacaaaactcaaatgtgagacaaacaagatttcagggcaaggaaacagactcaggagctttcctgggggcatggctccctcaaagcctacgtcctgtagagacagcagctgctaggcttcttggatagagtgcctgcccccagtgccactcctcactccaccctgcaaaagtctcaaaaggtatgttgaggcacagtaagcaggctgctagagcccagcatacttacagccctgaggttgtcagacaatgagcctcgtgatgagttattgcaccaacagctgttgcccagccctgctatgtggatcttggggacaataatttatccacaattacactggagagcatggtgcttctcaggtaacaggtggaaattcacaagcccaccatgtgatgaagacctgcccttccctgaccacaatgctatgagtaatgactgagaagattgggcagcccatcctcagtaatgcaggatgcactgtggcccatgtctgaggcatctgaaatatcagaaactccagtgggcttaccatggtcccactcctgccataatggttgccttacagtggctttttcttccaaaccaacttgccttcaactgcagaaggtgaggtccccaaaacaccagtaggccataggatagtgtgcggccggtagaataagaacctcagacacttcccacttcccctggtagagaaggtcttagtggccacaccgaaaggtaggtggaggctaacagatctaaggctgcccagtgtgccatttctgcactggatatgaaatgtgccctctctgagccctctctctgcctcagcgatctcatctatagaatgggggtatagagatagacaatctcatatgtgatcttaggcaagttcagatctcacagtttccaaacttcagtttctccagctatgaagtatgagcttgataatcttggctgtgtgactttggacaaggcccttccactctctgagccttggtttcccatctataaaatgggccaatggtaggggtgggaaaaggatgacctctgaggtcccttccatacagctgcctctgattcttcattgcaagtgacccagtgttccatatgacccatagccatctgtctgtcctttgtgccaggcctgaagcattccttttggactggtcatttctcaccgtcaccccctggagtctgccccaatcatttctcagtccttctgactgtgaagtgtctgtctgaactcataatcagcttttagctggtcccaaacagtgagtgctaccagctccattaatcccactgacagggatttatctttctcagctgaatgaatgatgctcccagccttgccccagaaatgtgggctgggctattcaacacttgtcaccagcaagctcttttcctgaggctgcatactccagccacccaggtgactgagtactttgtcatcttcttctcagagcagtggcagaaccacaaagcaaactcccacccatgacccacccacccaccttctgacctagtttggatgctccaagccataatgataaagtaatgttgtgaagagggaaagaggtttgcagtcagacagcctgaacccaggttctgccatgtacaggctgaagcttggcaagcctctgcacctctctgaggtccatttgcacctctctgaggtccatttgcacatctacaaaaatgcgataacacctacctagcagagttcttaggagatccagataacaaattgaaaacatgccagataatgcctggcacattttagaagcttgagatctactactggttctcttccagttctcccatcgtagtaatatcatctacagagcaagatggggaaaatgctcactgccagatcccattctaaagaggtatctccatctacagatttattgcacccgggctcctagccatacgcccaaaagtcaaactgaacaacagtaataatatttattcagccatgtcacactgaactgaggacctgacttaagcaacaattcagatctgccaacatttactaagcacctactatgtggcaggccgcgtcgtgaccccctggagagagaaagatggattggaaagtgtagcatcaaaattaacagcttggtttggaagtcagacacacctcaggtgaagatatggattgagtcataaactccccatgtggcactgggcaggttcatcacttgaactctctagacctcagcttttaaatctaaaatgtcccatagagttgctacaaagattacatgagatatacacttagcaaagtgcctggctcacagtaattgtcagaaacagaaagtgtcgagactcaaccctgcatggaaaagaaaataggacacacatactatcttagtccattcaggttgctataatagaataccttagattgggtaaagtagtctccccttatccacaggggatatattccaagaccccccgttggcacctgaaatcacagatagtgccaaaccctatatgtactatgtttttcctatacttatatacctatgataaaggctaatttataaattaggcatggtaggagattaacaacaataactaataataaaatagaacaattaccacaatatagtataataaaagttatgtgaatgtggcatctctctcgttcactcgctcaaaatatcttactgtattgtacttacttattttcaaactgcaagtggccatgggtaactgaaactacgggaagtgaaactgctgattggggggactactgtaatttactataatttataaataacagaaatgtattgcaaagtccaaggtcagtgcacaagcaaattcaatgtctggtgagggccagttcttcatagatggtgccttctagctatgtcctcacatagaagaagggacaaagaagctctgttaggcctcttttgtaagggtactgatcccattcatgagggccctgccttcgtgacctaatcaccccgcagatgctccacctctcaacaccactgcaatgagtattaagtttcaacatatgaatactgggggacatgagcgttcacgcctatgtaaatactacacagaaagatgtttatcaggtaaaagaaagtagacacggacagtcctcatttttctaagaataattggtaccagtacaaataccacttaaagagaaacttcttaaaacaaatgttgactatttactgtgatagtgaaggaaaaaggttggagtagggccaaatcttgaaaaaataaaattgaaagcacaaaaataagtcttttttattgtctagtaacaaaatgtaggttttagtgtcaaatgagttaattttttccattaaaaataggaattaccaagtgttgactttgggggaggcatggcacattttttagacaaaatcctatcttagcacagtctaacagttttgattttgtttgactttcacagcacaataaataaagagggtcatttggggcaaatatttccaagctttatccattttcccataggcctcttccaatcgttagaagataacatttttctcctttgaagcacctgacaactttgtcacttttctcttcttcggttgctaactagtttaactctgccagtttctcatttgcctgtagttaaatgtgaatggaaaagttatccaacaatacttttgctatttttatgaaatcctgaatctgtttaaagatttgcacttttcctcttcatcaatttcctttgaatttccattacatcatcagacatttacaacaaccaacaagccgaaggaaaccaatagatctaggttaaatgagtaaggctagaaaccagcgttaatgggaggtaaaacttaagcgtgcataaaacgtttaagtgaccggctcattcgtaagtatttttgtgttatgaagatttttacttctctatcaaaccttgtaacctcagagaattgaataatgacacttagttgtcaaattcaagataaccgacaagagaccgggcgtggtggctcacacctgtaataccagcactttgggaggccgaggccagcgaatcacctgaggtcaggagttctagaccagcctaaccatcatggcggaaacccaatttctactaaaaataataataataataataaaataactgacaagaatttctaaagtagttcagaatagaaagcttactaagttgattcatttaatggttacccttgatattttaacatgtactattacatgttaacatgtacccactaaatgtctagatctcattgatacttcatttaactcctgaacaataatagcttttcagtgtttggactctggttacctccttcctgatgcataggctactgttcatcattttagttctatcttgttacttttagtcatttatatttactatacttacagacactgttgggtttatttttagcaccttcctatttgtttttctatttgtactatctcttctttcttcctttatttcttcattcctgtcttttcaaaaattaagtaaatagttttattattgtatttttttccttatattggcttcttgtttcacattcctgaattttgtgcagtggttaccctagaagttttaatatatatatttagtttattatagtgtatttttaagttaagacttttacttcttcctgaacaatgcaagaactttacaacagttaaactcctgtacccacttctttctttttgtgctgttgttaaacattttacttctgcatagttataaatctgataagacattattgtcattttaaacagccaatattcttttatactaacccaaatatctctcctttgtagtgtttttcattccttcttgcaattttgtgtttctggattgaataattttccttcagcctgaagattcttatttggtatgtcctttagtgtcagtgtgatggcactaaatttttgctgattttcagcatttgtgtgtctgaaaatgtctttattttgtttcatttttgcaggattttttgctgtgtatataacacaagagtggcagtgttcttttcctcttactttagcattttaaagatttttctagagtccatcagtgtttgttgaaaaatccaccttattggtgcttccttgaaggtaatgtcttttttctttgttactgcttttgagaacttctctttacctttgttttcggcattttgactatgatatgtgtagttatgattttctttgtgtttaactttttggagggcttggtgggcttcttgaatcaatgagttggtttctctcatcaattttcggaaactcttgatcattgtctttccaaattttgcttctgcccagtttctcttcttgccttctgggactccaattatgtgtatgttagacctttgataatgccccatgtgttactcatactgttgtcttttaatgttcctttctcttttctctctggttttaattggaattttacctattgttctgtctttaagtcactgaccctatagtctgctatgtccagtctgctgtaaacccatatagtaagtttgtactattttattgattccaagtaactattaacagatactagatttgagaaggctatatgtttttgttcattttgcccatctttttctctattctctttaacagaataaccatagtcaaagtcctgtctgatgaatacaatagctgggtcatctatggatctgtttttattgttagctttctttttctctttgctttgcttcttttcttttctcttcttgctttttcacatgcctcataattttgaccataagctggacattgtatgtaaaagaactgtggaggtttcagctgatacattccaccagagcagcttccccctttcctctgttggagagtcagggtgaaggctgatgacctcagtctagtcagaaatttaagaggattgcagtttgagaaagactgaatcgaccacctctggcttttcccatttccttgtgtggtcttcatggctttggctgggagcctagctagtctctgtctcctcagccctaaaagcctgaagagattcagtcctgctctttagaagttttgagcttttctggctatcttcaaaatctggcaaatatcttgaggggaaaaacagggatttatgtcaggccctttctctctctcatggaatgttgtctcctaagtcccgtgagtttagcagaaatttcattccaaccttccatcctcatttcccagccacctgagctgcatagagcacttagcagtgtcctatgcgttaaagccaacagtcacttggcttcttatatttcaggcttctcttgtttccaatccatcatgccagccctgcacaactgccaaaagtgctgcttggtttctgctttctccagtagacaacctctgcttgggccaatgccagtcctcaacccacgtccagaatcagcagttgcccacagggaagaaaactgtcaggagttatcagcctacagaggacccactttgtcctcatttccacagctttctgatgtcttcaaattttctatttttgcggcttttctttttttttcttaatagttgttgcagtaggggagtcagcctgccacaatctactacatcttacctggaagcaataccttatcttgttatttttaagtcaacaaattagacattattattattaatatatacagcaatatttagagtcactcgcacataaatattaatttagagttaatcacatatttgctttgtattcctttttgaatctctgactttctatctgtgctaattttccttctgactaagccacatcttttagaatttcctctgtgaggacctgttttatttattcaaacataaaaaatttgtttgctctcattcttgaaatgtaatttcactaagtattcatttacagttggtcaattgtttcctcttgacacatggaaaatatcattcctctgcctctggctttcattgttattgttgagaagacagatgttagcctaattgctatttatttgtagatggtctaacttttctctctaactacttttaatatttctccgtcacaggttgtgatgttactttcatcttctggaattgttcttccacatcttatcatcgtcttccattatttccatctttgtctctctagcttgttttatttataactatctaagagtttactaattgtctccttagttctttgctccatctatatctgtccattgtgacttaaaatttcctttttttaacttttattttaagtttaggggtacatgtgcaggatgtgcaggtttgttgcataggtaaatatgtgtcatgggggtttgttgaacagattatttcatcatccacatattaagcttagtatccattagttatttttcctgatcctctccctcctcccaccctctggtgggccccagtatgcattgttcccatctatgtgtccttgtgttctcatcatttagctcacacttataagtgagaacatgtggtattcagttttctgctcctgtgttagtttgctaaggataatggcctccagctccatccatgttcctgcaaaggacataatcccctttttaatggctgcatagcatttcatggtgtatatatacctcattttctttatcctgtctattgctgatggacatttaggttgattccatatctctgctattgtgaatagtgctacaatgaacatacgcgtgcagctgtctttataatagaataatttccattcttttaggtatatacccagtagtgggatttctgggtcgaatagtatttctgtctctaggtttttgagaaatctccacgctgtcttccacaatgtttgaactaatttacactcccaccaacagtataacatcgctcctttttctgcacaacctcgccagcatctgttattttttgactttttaatagtagccattctaactggtgtgagatggtatctcattgtggttttgatttgcatttctcacttaaaattttgaactaatgtatttttcatttctagatgctctatatggttatttttcaaatctgctaagacatttttatagtgtcttattacttgctgaaatgttcaaacctcttttatttcattaagcatataaattttgccatctcattttctgtgctaataaaaattctaatatcggaagctttaataatcagattctgctatctctttttcctgcaagccttatctcacagtaccttgttttcttgtgtgttttacaattgttgacagtgaatattctttagaactttatccttgataattattagaggaatgaattaaaatttcacttctccggaaagtactgtgtttgcaccttttaataactcaagagaggtaacaacccaagttcattttcaattaaaattttcatttgaggtttttcagaccacaaacccatgtgagagctcacatatggttacaaattcttgaagaaaatgaggctccttccttccccatccaccttcctagtaccaaagtcaggacagacaggttttctgtgttagttcacttctcattcacctttgtattaaaggtctagctctttgaggttcaagttttatgttgggacctcttcccacttggtagggcctgggttttacctactgggtttctaagcatattttgtggttaacatcagaggccaggagactcatcagtgtataattaattcttgtataactaattatttaaaggcagtggacctattcactagcaccctgctttcggagtcactgaattcatgtttgccctcagctaaagccatcctgaacctctttagatgggagaaccctgatgctggtacctgtagcatgggggctggggctggagaagccaagtagtacactagggacctcacggtcactgtgagggatgggggtctctgcttggcttctgaacacccaaaagtaagctcttctgccttcactccatgtccactggagcctgggatcctctcataagaagctatatttactctaatgaaaaaaaatctcacctgggctgaaaaagcgtatgctatacatgagccttggttaacctaaactttcatccagagtttcaaggattaaattcctaagttctttttaaagcaaagagaagttagttccagtcctaggccatgataatgctcttggctgagaaaacctccttcgtttttttaaaatatggattctgagggtgcaagtgcagtttcgttatatggaagtattgcacagtgatgaagccatggcttttagtgtacccatcatccatatagtgtacattgtacccaacaggtaattcaccatccctcaacccccctcctctgttttaaggaactggcatttatgcaactaattgataaaattatcatctgtctcttaaccagattaatagtataattaaggaaatctgggatgatgatagcaggtttactgttgatgaaaccattgaacacttgatttaacccattaacagtgtttctgaaagtatgttccttgaaacactagaccatgaaaagtcctttatgttgaaatatgcttaagaaatattatatgcttgaaacttctcttggaaactcacgaagtatattagacattaaaggctctaagaaatcctgcaataaagaagcctatttaattttatttgactcggtgttttcaaattatgtgtgaccacagaaatagaaggaacttggaggagtaataattcattttttgggtagaattcactactgtcacagatatttgtatgctgtcaatgaacatttaaatgtggattatagagaaagtaagatttattcaacaaatatttgctgaaagtccactatgtgcttaccactttgagtatacatcggtgaataaaaaagatatagttctgtctcatggagcttgtaggagcattggactgtcgtggaggcattaagaaagaagtagcaagtgcctagaatccagctgcccctcaaattgttggatcacagccgtggaacaggccccagagctgggaagttgactgggcagttggctgttgtatccagcctgggagatgcaaaatttattgacataactgtacccctcaagaggaccataaagaagaccaagcagaaacacacttggttctggaacagaaaaaagtttatctaggaaaggaagtttaggaaagactgttagataagaaactgggtggtttttaaggcttgcagaatctcttattgatctgagaattcctcccaaaacaatccctctaaaagtgcctgattcataatccagtgaatgttaacaggaatgacgatgatgattatgatggtgatgatgatggcaatgatgatgatggtgatgatgatggtgatgacaatgatggtgatgatgatggtgatgatgatggcaatgatgatgatggtgataatgatgatggtgatgacaatgatggtgatgatgatggtgatgatgatggcaatgatgatgatgatggtgatgacaatgatggtgatgatgatggtgatgacaatgatggtaacagtgatgatgacaatgacaatactggtgatgatgatggtgatgacaatgatggtaacagtgatgatgataatgacagtactgatgatgatgatgatggtgatgatgatgacaataatggtgatgacaaggttgatgataatggtggtgatggtgatattggtgatggcaatgatgatagagtttaatctgcaactccttcccttcactcaatgctatggccaattggccaccaagaactgtgagtctacttcataagtaactaactcttaagctcatcctttaatttctttggaacagggcttaacctttctcaacagccccctcatctcatttaccttctttcagtgtgtgttcttccaatctgtctccacactgtgccaatgtaagcttcctaaagtttaagtctgggtacaggcgcactcactcactccgtgcacttttacacttttatgccttttttgtgttcttctctacttgtgttttctccttcttgtcttttagcaagacatgtactcatccttcagggtccagctcaatggtgagagcctctctggggctttggctgatctcaccctggaatgcactgcaatgttcctttgcctaggttcctgcaatgctttctccatttatctgtataaccctcaccacttctaagattacgttattatctgagtctgtggtgagggaacataccacatctgacctacggttcattgccagccccctcccagagtggaacactgaaggcacatgggcaactgttgcaaacgtgcagggtaaatgcacccccatggagtgacagctatgcagaccagagcccccttctcccaggttctgtgttgcccacacctttcttgacagtcctgggccagggcttccccaggtttggaatccagatgagtctgaaagcaaatgtcattctctttccttcaccacacagtagcatttgttcttgccaaggtagctgtgtgtgtgtgtgtgtgcatgtgtgtgtgtgcttgagtgactgtgagtggttgtgagagtgtggatgagagtgtgtatgtgtggcgtgtgactgtgtatatgagtgcatgtgtttgagtgtgtatatgcgtgtgtgtgtatgtgtaggtgtatgaatgtgagtgtgtgtatgttcaagtatgtgtgtgaatgtgagtatgtgatgtttgagtgtacgtgttagtgcatgtgtgagactgtgtgtttgagtgtgtgtgtgtatatgaatgtgtacgagtgtgtgagtgtgtgtatgtatgagtacacgtatgaatgtgagtgtgcatgtgtgtctgagtgtgtgtatgtgtttgagtgtgtgagcgtgtgttgtgtgcgtatgtgtgtgtgagtgtgagagagaatgtgtgtgtgtgtgtgttcatgccgatgttcacgatgggctggagggaggaccagtcccctactgcgtagatcgaggatgctgcctttacccagtcttcatgaagttataaaaattacagccatttgtcacaggtctctcaacacagcactgggccctgggaggaccaggccacatctcttggcgtctgaaataaatgaactcatttattcacacattgaggccacacatgtttgttgcaagtctgtggccaggcacagggctgggagctggggaataaagagctgacccaaacagcagaaccagtttgcgttttcatggaattcatgatccgctgctctgacagtgggcatgggtcagacaatgaccaagtaaacagatcagtaagatcatttggagaaacgagaagggatccaaaggaaagaaagcaggaggccacgaggaggggagtgtggaggagtgaggggctgctttaaattcagaaatccttgaagactgtctaaggaggtggcgtttgtgttcgggcttccataacaggtagggggaagatggaaggctgctccagaccagtcagggagaaggggagtgagggtggttgtggttggaccacaggaaatgcaggaaatgaaagggagggtggtaggaaaggcaagggctagaccgcacagggcctttggggccagcgaaggaagtggattctatcctgagtgcaactggaggccactagaagggcttacgcaggactgacaggctccgattgatgcttcccaagttcagccgtgctgcagggcaggaactgtaggaggagatagcgtggcccagaaaggcagtcaggagctgtccaggccagctgacgctgacgatgagtggggcccagagcttagactccctgagactcagccctcctctcccgcaggaccccagcagccagccttggagggctcccaaagaatgacatcaccctcagctcccagctgcttgatatgcagggaattcctcccaaggctatgcagaggcctcaggcttcagcagcaagctgcggcccgtgcctgggggagagaggaggggaaaatcgtaaccccagcagcacctcctcccgtgacctagactctgggccagacaccacaggcattttctggataatcctcacaactgccccatgagggacacctctgtcgaatcataaaatcctgaacagggaaggatgcctggagatcatgtgacctgtacccctgtgtcgaaacctgtgtattcctggttcttgtttatttattcatcatatccttaaataacacccttactacttttcaatcacttgaccaatattaattttcatagccacttcagaaggtcagaactatcattattcccatttcatggatgaggaaaactgaggcccagaaaggcaaagtaacttctccaaggtagcactggccatcatttacatctaggcagactgacccagaatccatgttcttctaggctgtacatgataccacctgctctcggttgttcatgagctggcacagtggaaagagctctcctcagcgggctggagcatctcttgtacgcccagaggtgtgggtgagctgttctgtggcacaattgtcatcctggggtctgcgacggtaagactcacctcagaggaagggctggcctttcattcctagctgcaattccttacaagtaagaaggagagggcctcaaacaggaaacctggggtgaagaggtgaacctcagatgcctatcttgtttaaccttctgtctccaggcttagcacagtgcctggtacagaggaagtcctcagtaacattgttgagtgaacggatggatagatgtgtgtggacccgggttcatccttcacatgagaaagtccgtgagatgtttacatccaactcaatatctagcacatacaggtggacaaggcagaaaggcaatgtcatggctcttgccctcacactctagggcctagactggtgtgacaatgtccatgcttacatgtcctgtctaaggaaagcagctcccgttggtcatgcctgtggaaatgtggccctgtatggccagctcttctgatttttcataagaacctggatggacagatgccatgcaaagtttttttttttaattttttaaaaatcgtgtgtatcccaaagaaaatattatctaagggtgaaatccagcccagggggcactagtttgagatgccaggtctgggatcagtagcaggtggcccagaatggggactgggttggtgaagactaagaagaatgagaagctccctggagcctccgagaggaaggtacattttgcatgccagcttatccggattcgagacttgctcgatgtttattttctggttgtcactccaggattttagttaagtcttgtctaacattgcagccaggctcagccattctgtaggaggattaaaggatgggactgtgtataaaattgggccaggatggcaagcgagggagcagctcttgaggccagaagagtgggggaagatggcttgatgacagacggaatctcaggcacctgaagagtcttagaagccagatttggggctgagccgcccttccccaagtggagattcaccagccatggccagactcgaggatgtgagatttatttttcttaagatagcaaatgtctttgcaggcatgcttcccagttgggaaattctttttatgctccatgtaatccgtctgccagagcctcctttgactctgtttatcggttctcttcctgtatgtgtcatgctctccttccctctctcctcttctccccttctcgtcaccacccctttgctctgcaccacccagagcctgttaggaagaaaggggggatacactcatcctggctccatttagggtgggcttttaatccagacatgtcgctgacaccagcatttgcaccaggtatttaattagaccaggaagtcccaggggatttgagaagctggctggcgaggaatgggctctatctccatatcttattttgacaagcactgtaattatccctcattgctggcaggcggagcagaatcacgttcgttcccagccccatcttctcagaacaagagtactcaggctcctggttgctccaccactaaacaactgcctgtctcagttccccagcgagaccgagactgagctcagccattactcaggagatcgcaggcgggcgctcagcctactttttgacagcatcgtggaggtgatttcagagcgcttgctgcatgcacatgggaaatagcttccaaggaggatctttgggggcagaaggaatgaggtgggcaccatgccctccaaaaagacagaagttacccctccaggagccagcatgaatggagcacctaccatgtgcccatttggtattgaatttaatcttctcaatagcactgccaggtcagtgttatcattccatattaccaatagggaaactgaggctgtaagtgaggaagctgcagagtcagttgcagtggcctcagaattccgaccaagagctagctggccccacggtttcttcccttcctactttacagcattgtggctcagggagagcacacatgccctcatgctctgccccaaacaatttgtgggtgctggaaagttctggccatgtcaggagcaagtgctttctcccttgctgtgctgcccaaaacttctttaaggaggttaccctcatctgtcaaacagggatgtccctgtctgtcccacagagtcttcatgaaatgaactgagatggcatattttaaagccctgggaaaaccgaggcagcctcgggaatggtgacgtatctggttattgagactgtcttataatttggggcgtgaaaacctagggctacagggacacaaggtaatgagaggaaattgccaaggaaagcgaatgcaaaggaaacaccacccaagcccagcctggcttccaggtaccctctgaaccagcctcctgccccactgtgggccagaatagaccagcctgctaggaaaacctttggcccactgcaacaatgacaatcacaacaactcaaccgtttagtgaacacaaaatatgtacgaggcacgggattatgcacaggaaccacgtccgtacatttcattctcaagatcctatgaagtaggtgttattatccctatttgatggatgagcaagctgtggttcattaaaccacatcccccatgtcaaacagcaaacaaggggtgaggccagttggtcttgacagtttgtcaaaatcgctgtgctagaaaaccaccctccttactggttgtgttccaggggttcccaaactcaagttcttcttggaggagctgcaagaaatgatttgagggtgatagcaaggaagaatgcatctgagatgccaggctcaggagattcctggagtcctgcactgtgtgccctttggcccagaaggcccttgtaagcacctttaggtgttgtctgcatttcccttccctttctggtcagggaccccagctctctctgcatggattctcctctccaggaggtggggggtgggagccgatgtcaacagggaagaggggcagaggaacaaggacagggatggggagaggaagaaagaaggaggtgggatgtggcagctgggcccggaagcaggctagagccagctgcacagctctgacaatctaaagtgtctcttccgatggtctccattcagccccatctgcagatagctcattttgtgaatgaggcctgggtgtttgttccagaaccttagctgtgattaggaaagacaggagcacttgggaggccccaccttcaatgcaccagagtatttctagaccctcattctgcagtcagctctagctgccacatcagggaattcttgctggtctgtagcctggattccaattgtggatgtggcctgttaaaactttcctgggtaggacagtgtgggcgttctgccttaggagtcagacaggcctgagtttatatcccaccatttccatatgctggctgtgtgaccttgaacaggtcccttagcctccctcagcagtggagtggaagattaagtgcacagactctgaagctaagccttctcccatgctccagtcccagctctgccacttactaactgtgtggccttggcaaagtgacccaacacccctgggcctctcttctcagctgcaatacagggctaatacaggcatgcatcttatggagttgtcaaaaggatgaaacaaattcatgcatttaaaggacttggcacatggtgagtgctcagacatgttagccagtatccaggcatggtggctattttctggaataaatatggataaactgagacaactttctctcctgaagatgggtccattgcgaagtcatctcaaagaggtgtggcctggagaagtggttccagtacctcatgccttcttccccttccctccttctctcctgcctccccctgcattcttcatgtgcctcctgctgtaagcatttgctgagcctcctgctgtgtcccaagctctgtgcttggggtcaaccacccagaaatgaatcgtgtgggtcccatcctctccaagacaaacagttagaggatggtcagatagtgccagtggagagcagggaaggcctcgtggacaacatcctatttgagccacatgaccatcagggaagagcatttctaggcagaggaagcagtttgtacaaaggccctgaggagagaacaagcttgagaaataggaagagtgcccgagtgtctggagtggagggacagggagaagatgggtaggaatgaggttgagaagtagctagaggtcaaatcatagagagctttgaagccacagtgagaaatgtgggcttactttgagttttctagcataaggttgttctgaagattaaatgacaggagacaggtagagtgcttggaacagcatctggcgcattgctgggccttaaataattgttacttttattatggtggcacttatttccatattcagccctgaggctggctgtggtctactaggaaattattggcattctggtttaggagagaggacttgacgggatttgggtgacaagtctcagttctgcccttccctggcctagccaagctcccttccttccctgagtttctataaaatggcagcatcacattcccctccccaggtaatgtgacaatgaactttaatgtaaagtgccacccacgatcaaggaatctcatcatttaaactgcttttgccatctaaggtcagaaggcttaaactgagcccgtaattacatcaagtgcctgtaatcctagctacatagaaggccgaggtgagtggatggcttgagcccaaaagttcaagaccagcctgagcaacatagtgagacccagtctccaaaagtaaataatttaagagaataaaaaattaattttttaaagaaggtttaaactggttgtgacctaaggaaacaatttcttccagccgcatcattgaacaggtgggacaccaagctcccttgtagataaagatcgaggtggaatgggagtggacactgactccatctaagatcatggaagcgctctcacagtgaccctactgggctctctggaagctgcatcccagcagctgtgcagcccctgggaccagccaggagtgacctgggtgctgccgttcaacccacctgtacatttcccaaaaagaggcagccaagtgctgattcagggaatttaaactttaatggtcccccggtctattattatgttttaatgaactggaaaagcacaaacagaaatccttaagagcatcagccgtgacacagaaatctaatacaataaaacaaagtgcttataaaccccagagttgtttaaaacccagaaattgccaattgacatatgggactatatcttcttagcccctagtaaactgagtggcttcaaacaagtccctatcacctcccagggcctcagtttcttcacctgtgaaataagaggatcaaaaaaagataatgttctctctgttctcttccaaccgaggcaggcatctcaagtatttcttagtcagttctactctaggctacacagtatctgtatctggcagctgtatgaactactgttgaaaatcctcttcccaatcccagtttcaacatcactcctcaaggcagcatccaccttcactctagactgaattaattcctctgtcttaccacctaaactcctctagaaaacttgatagaggtaaagataaatgcattttttcaaaaattctacttttctagtcccaaggcattgtgtatatcattcttatgtaagttatcacaataaacccataattagttacttccatttatgtcaaatcgcctacaaagcagaaacatgtattattcatttttggcttcctccccagtatctagcatacgaactgtttgcaaacatgcccagttcttcaaactttgtaacttcatgccttttctatctactacttgggatgggcccaccctccctttgtcctctaagcacactcctattcatccttcaaagtccagcacaaaaatcccctcctctgttaaacttcaactgctccaggctgagtcttatgtttgggtccttcatacgtacccctcttctattgtttggggtattgtgtgctgtgggatctgtttactctcagttctcccctctaggctgggttccttgaaaaacaccctctggacatttcacctctacatcctctgcattcttggccaggctctgagagggcattggtaaatgttaactgcctggcaatggtgatgctgttaacctgatgtgtcaggggtctgaataaagctgcctcaaggtaggcagatgcccacaaccaagcaagaactcaaagctgcaggctcctcagcctgaaccttagacagcgtcttggtcaccatttcaacaccttgaccacatttctcactctcccaaatttcctcctgcttattcctcatccacatacataaggctgtgtctcccaggggaaattcaactacttggtaattatcctgcttcttaagtttggggctaggggattcatagatgatgttcagtattatgctgtgcaatgtagatgcttcctaaaccttctcaggagctaccactgagtggcacctggggacctctcaggaagagccagttttctgggcagtgtggggcaggacagagctcattaaaccagcctaccacctgtcttccagctcctcctctcagcctctgggcttccagcagaaagcacacgagagcattcttgttggttttcttatgacttgagccagcgagacgtacatgcccagcacctgttacctgggctggctcttggctgagagcatacatgcattgggtcaggtttcagatctgctggaggaacacagccagaatgtcttgacaggcagccctggcaaagccccagaaaatataagatctgagtcttatgatggactctgtgaccttgagcctctcacctcgtgaccttgggcatctcatgttctctccacaggtctcggttctggactccttcatgggagctgtcatgcccctgtcacacagcagtgttgtgcccccggggatcagggaccaggatggtcctttcttggtggtgaagggggcattttgcatattccagagattcaagtttccagacctatctagaaagaaacatttgagtttacaggttggcgcttctcagcctctgtctctcttcctctctgttcatctccctctgtcccctctatgtatgtttgtgtctctttctgtctcctctgcctttctttgtcatgtctttctgcttctgtcctatactgtctctcacctccaccctggttccccccgccccagatgctcttctctctgtggggttttttcttcccctccatttccttctcctctcccactccttcctccccagattctccctcactacaggcttctctctaatctctctctaactgcctattcttctcacaagaaggagtcccctctggggcccagaggccaggcaaggcattgtggacaaggagggcatccgtgccatccaacgggcaggagcccagcctcctggctggtgcgtggctgtgctgtgggtttgtttccacttaccaaagggcatctgtaattaatgtgggcagtgataaaggagctggagatgtgtttatgctccttcgagggctgagatgaaacacccataacatttaatgtggcgcactgacatttaaatgtcaattagaaagtccccgctctgcttggctggcccctgcatcctcagatgagaccgccctcctccctgccttgccagccctgctgggaccaccagctcacaaaagacagtggccacacagcaaccgtgactgaagagtgtgcagggtccaaagaggctaaagtggctttaagagcactccggagggggaggactcttggaacagagaaaggaggaggatggtgccaggccaccaccaaaggcacgtggaagggggctgggcaaatggtgaaggagcatgtgggagacaagtttagaggtagcgttggcttcctcctctcttccctcagtacctacagggcagaatctagagcttgtttgtgccttggcccttaggcgctatgtttctgcctctgtggttgatcaccctccattagaccaagggcttcttgagaccaggttcccatctcttcatcacacaggacgcctatgcacacacggtgcctggcacacagtaggtacacaaggtagtctattcagttcaatacagtatatattcgttgagttcccactgcgtggtgggcattatcctaggaactgaggctacaacaatgattgggactgagacctgcccccacagagtgtacagatgctcttcaaattaccatggggctacctcctgagaaacccattgtaaatcaaaaatacagaaatcaaaaacgcatttagtacccccagttaatccatcataaagtcaataaattgtaaattgaaccattctaagtccagatgctccttaacatacaatgaggttatgtctcaataaacccatcataaagtcaaaaaatctgaagtcagaccgtcgtaagtcagggatcatctgcgttacatttttaaagacagacagaaaaatagatatgtggcaaatgtttagatggaagcaaagaaaagaggcagccggcccaccctggatgacaagaaagcttcttggaggaagtcaaatagagctgagacccaaagaataaatgtgcatttgcaagacagagaggcagagggaatactggacagagggcccagcacaagtgtggagccaggagggagcctaggagtgcacaggggttggtggcaatgggcacagcagcttccttgtgaaatctgagctcagagaccacatgactgcatggggttctgcaaccagcacgtgagctctgtgagggcaagggcctcatctgtcttgtccactgctgtgttcccagagttggggaaagtgcttgatgtgtagcaggcactcgacaaacatttattggatgagtaaatgaatgctgtcttcactggcctctcctcccttgtccagttcccaaagctcagtgggtccccgcaaatgcatttattttgcaaaagcctttcccaaagcctggcatccaatgggtgcctcatttcctcatcccctgcacgccgtctctcagtccctgagctgctgtgcccacgacatgctccattttctcataaaagcccttccaacaaggggcacatttgcatttcaagtttcctggaattggagtacagagaaatctgacttccagagcccagggctctaagctgcagctggagaactgaaacacagcaagcaggacacctgcccagaataaggttcaggccctggaatatcacatgggacccatgctcctgtagctgtctgcagtctcgagccccaaggcagtagaacaggtgttcatcttctcctgcactctggaaatggagtccagggcctgagctactgagtttgtagactgcaactttggtagcaagaggcatttctcctcctcacctccacccacacacagatctagttcccctcgtacgctgccctttcagtcttggacactgcagaagacctgctaggagagcctaagaaacccaaagccttcccacctgccatccaccaactatcatttactcacccccactcctccagagtgcagatgactatttcacttactgatttggcaggcgctgctgctcctcaccttggttggagtagagtttaccctgcccagccctgcaggcccagtggtaaagggaaggaggctagtgattattccgactttggatcaatcagttgctcagtttattggaattacatcccagtggctgctattgatggaactgctggactcgggcccacaatcctcatgccagttttataacactgacatcacctgctcacacacagggcttcctctcccatcctgtccccatacctcactctgtagcctgagatttctaaggtgggggatctgcactgggtgtttggcataaatgatgtaagagatttcctttgtattgctctcagctacatcttacctttgtgtaagaatgcaaagtcataagcacagtttacaattgcaatgggaggtatgtgctagttttaaggtgttttgtttttttttttgtttgtttgtttgtttgagacagtttcactcttgttgcccaggctggagtgcaatggcacaatcttggctcactacaacctctgcctcccaggttcaaacgattctcctgcctcagcctcccaagtagcttggattacaggcatgtgcccccacacctggctaattttgtatttttagtagagacagggtttctccatgttggtcaggctggtttccaactcctgaccttgtgatcagcccgcctgagcctcccaaagtgctgggattacaagcgtgagccactgcatcaggcgttttaagtttctaccatttggggcatattcaggaagattcctatcccaacacaccccttccttctgcttttataaacacacagagtccccaaccaccctacgtcctctttcctccataaccacgtcacagtgcactgtaaacacattacgaaccagctatgcaataacaatctgctgaatctcagagatgcagaaagaaatcactgggccttctattgatacattcttatgttatcatttttaatttctataattatgtttttaaggtacattgtgtatcagcacagcagcagatgctaataatatattaaaaactgtactcgtgttctgggagtgttcacaaattatagcttcacactattctcatcttctcccgcctctgctcagatgtccttgaaacatctctaaggatcctggaaggcaaactgactacaacacttatttgcacagcacagcatctttcctatgacacgtcttttggtttttccaatcatcaaaagcaagaggtagcaggagaccgagctgttaggcactgaccgtggcattgcctccagggtgaattgcgggggcacaggaaaaacagctcagattcctagcttttccccaccttcctgatctactgaaccacactttctccagggatgtggcccgtgatctatattttaagaaaacacctcaaataacttcccagccaggtgtgtgcaccacagtgctgggacgtggtattgttcttgccatgggaggtgggagattcttgtccatccttcacccagaagcctgcatgtggtttgtcaatttttttttattttatgaaactttttttctgtttacactcttgcagaacaaacagacaaattatatagctgatgtcacatccctttgaaaaatctatcaggtttcatccattcattcaacaattgtttttaccagttacactttttttttcatttgccatatacagaaactgaggctcagtgagactgagagatttgtttctgacttagcttgtaagaaagagattcaggaactcaacctaggttacctggccccaagtcctgtgcccttttaattttacttccgtacattttaatgaaatggctgcgagaccagagctctgtgtgtgaacaagttgtgcctttcaaccttcctttatctccccttctctttccccaccaccaagagcaggctgatgagaaaattaacattcaggacacgttctgctcccttctgattcccacagagagaacacagcctctgcctgccaattagtgacgttcagatctctattagagatggggacagctagttccagttatgcaaatgcccttgtctgagagtagccatgggccagcagcatgccagtctcacctctccccatggagtcaccatggatgtgacttgcacctcccgtgttgctttaaccaataatcaaatcagtatctatttatataagcactggccaaggtactgcaggaagctcagggacagattttatttcagcctaaaggaacttacactgagtagagagtgtggccagggaaagggcagatctttcaaagacactctgttcttctctaaacactcacagtttctatttattacccaaaaaaatacataaggaaaaatacctaacatttgttaagtacctactatgtgccaggcactgttagacactttatacacattatctcattcaagtccattaattttatataagaagcaatatgctatttggttcaaggcatgtgttttaagtaggaaaaactaggatttttaaaactaggattttaatcctgccactttctccatgtgggacttcttgacctcagttattcatctgcgaaatggaaggaaacaatgtctgtttgccaggaatattttcagaagcaattagataaggtatttaaatccaagcacctcatcttcatatgacacagcatagtgttaagatgcctaatatgtagggaaatgacaaaaatggacaaatgcaggatattattagcaacaatgcaaaaatatctgtatatggatgaagagtggaagaggacaattatgggggaaacttgttgtcttttaatttctgaactatctgtattattattattattttagatggagtctcactctgtctcctaggctggagtgcaatggttcaatctcagctcactgcaacctctgcctcccgggttcaagcgattctcccgcctcagcctcccgggttcaagcgattctcccgcctcagcctcccgagtagctgggattacaggcacctgccatcatgcatgactaatttttggttttttgtctgtttggttgtttgtttgtgtgtttgttttgtagagacagggtttcattgtgttggctaggctggtcttgagctcctgatctcaggtgatccacccgcctcagcctcccaaagtgctgggattacaggcgttagccaccgcgcccggccaactatccgtattattatgtattttcatttaagcttttaaaggaaaatggaaacactgcattaaactgagcctcagagaaattcagtgacttgtccaaggtcatacaaggactggagggaccaaggcaggatctatccattttcaatgcccatgctttcccccacacaccatgccaccacatgtccctcaggaaacaggtctgcaatgattcaggagacctcgtagtctacattgatagatgtaaacagcattggtttctgtcttagagagtgggccagtgaggaaggcatggatcaaagcaaaaagaaaagccaaggagggggaggatggagattaaacaggtccctggttgtcaggggcaaaactgttaatgacggtggagcaccatgaaattaatgacccacccaaagcacctgagaaattgaactggttattaaaatgcaaatcataaaccaggaaaaggaggaaaacaagcacgaggaattaggaagaaggaagatatggcatggagtaccacgaacagaaagtctgtggccagcacctggatattcagagaaagagtgtgatttaggcttcagaagggcaggggtctgtagcttagggactgggcagagctgttacctagaaaagctagaaacagaaatgcataaatcccagttgtccctgacagtgggatacagtcagggcctgaagtgcaggggaaggccatcttaggtcagaggcagtggttcttggcatacagtggttttccccctaagaatgttaggcaatatttggtgacatgtttaatgagcacaaccaggttaagtatctactcactgctaatctctggtgagcagggagaccaggggtgctgctaagcatcctacaaggcctggggacctccccaccaactacagttatccagtccaaaatgccatagtgtcgctggggagaaaccctgatctaaggatgagtgagaaggtggatacaggaggtgaggaggtcagaagtcagaccaaacatcagatgggaagctaggaggaaaagaggtcagaaaaggagttatgaaccaaaggacaaaaggaagttaagtagtcagtcaggagatgaggatcatagaggagatcaggcaaagagaagtccagaggtggaaaaaagcttcagagctcagacgggctgggctctaacaatcatcacagaagcagcaaagatcaagaagcaatggggaaggacagttgaggctagcgccagggggaagggccattggtgaggagcctttctgatcagaagttggatggagaacaccatggtggatgtggatggaggtcaaagtgatgatgttctggaaagcagtttaaacaaaacaaggggcctgcgtgctttactaccagaggccatctgttaatggatgatgggaaatgccactcttggcccccacagtcaggagcaggtcaccttcaactgggcacagcaacacgtcccactgcaggcaggcacaaaagcagaggctcattaaagagctgccctgggcccaggctacatccttggcaaaggatgagatttgcacccaaggtcaggatggctcgggtgtgtggagcacgggctacggagccaggtcaatggagttctaaatccctgatcagcaaccttctacagatgtggcctttgataggtcactgcctctctctgaagctcagtttcctcacctataaaaatgggatcgataacagaggttacatctgtgtggatcacctaaactgtagaggattttgcaaatgtgttgttgtggttgccattcttattgctggaacataattccctcattagtatttctgagtgctctggtgcatatctgctgcagcagaatccttcatgcatccagcaaacatttcctgggcatgtagtatgtcccagacactgtgctgaacactaagattacatggaggaatagagattaatttctgttctttgtttactaagctcctaggggctgaaaggcatcttaaagtccataaacttcctcctgatgcttaagtaccctccacaacatcccacttatgtgtcctgggcttgcacacttctggtgctgatgagctcaccgcctcctgagacaggtgattccttctacagaccactcagactatgagaaagttcatgccgggtgcagtggctcacacctgtaatcccagcactttgggaggccgaggcgggtggatcacctgaggtcagagtttgagactagcctggcgaacatggtgaaacccgtttctactaaaaaaaaaaaaaaaaaaaaaaaaattagccaagcatggtggcgggcacctgtaatcccagctacttgggaggctgaggcaggagaatcacttggacctgagaggtggaggttgcagtgagccaagatcacaccactgcactcccgcctggttgacagaatgcgactccatctcaaaaaagaaaagacaaaagaaagttaatatatacctgtattgagctgaaattctggttctggccctttctctgcggctacccaggcttgtgttttcatctcccacattacctcctattagggactttaatggatgacatattgtcacccagcctcctctgctggatcgggatagctttccatccagacaaagaattttcatgactgagtgaccatccccaggatgggctttggtgtctctcttccctcagaaagtgggaagctccaagtgctgccccctgaaacccttttccagtaaccatggcctccaggggtcctggggtgatctcagaaaggtagacagacctctttagcagtaacctggaatattttgctaccttcctgaaatctagagaacagagcaactttgcaagcttcttcaaaggagcccgttctgacccaggtcgatggagctcccaaaatctgcacccccaccccccgctgctgtgtgcaacaggagaggggctttcccggaccagcttttccagaaacatgaattctttttgacacttggcaaacatttggggaccctctcagacctcactctgggcaggcccgaactgtcttttccatgccagagggcagtccaggttcctatcagagttatttgaataatcttcccaacacctctgagctgcagtttcttcatgtgtcaaatacagataacaatagtacttcactcataggattggtggacaaagtcagtgaggtaccaggtggaaaaagaggtagaacaagctgggctttgcggcatgccaccgtagtcctagctactcgggaggctgaggtaggaggattgcttgagcctggaagttcaaggctgcagggagctatgatcacaccaatgccctccagcctgggagacagaacgaagccctgtctctaattttttttttttaaagaggttgaaaggtgtctggcacttagtaagccttcaccctagttagctttgctaggattatgatttccatccagacaaagaagttgccctcagtgacgttctagcagagtcatcaaaattgggttaaaaggaagcaatttagcatggagcgagcctaaaaatgcaccaaagtaatgaaaagagcaaagcatctagacatttgatatctggctgtttttccctaggaccattgtcatggatggggataggagagccatctaaggtccctgcccatctgcaacactctcctgtttctgctccgatgctctacgatgtcgtacgtggcagagccagcccagcgtggacttcagctctcccagtaactggctgagtgatattagaaaagtcactgagcctctattttctataaaattaagaaaaatcacactcccttataaaatccttagggaaattaaagatccttgggaaaatagatctcttacaggcatatcttggatacctgatcaatgatagctgctatagtcttcttctgatcatgcttttcataataatcatcttaatcattactggcattcaaagccatgaagcacctgggagaaggagaagctgatctgtccatgcctgtctcctttggaaaatgcacgctgttacacttccccacatgttcaaattcatactctctcccccacccccttttttgagtgcccccaataggcacttgagaaggctgaagctgggattgtaaactgccagatctcctgccttgctctcaccccttgttccaaatcttatcaaatattaaaagctgtgaaatagaggcaggttttaaatcattttaatcacagcattcctcagcctgctcaaaagggctcaaaggaatcgattcagaagtggtaattatgactgtggccccgtgccaggcggcgggtcagcattggagcaccagcgacagacggccggcactgactggggagggctcctcccaggtggggacaccgaacaggagatgcctcctgggaggaaataaagctaagtcatcccaggctgggtatcaggttttaaaattcataaccaagtcaactgaaaatcagcttacctttattaagtcccccactaagtgccagatgcttttagcctcatttaaccctcagataactcctggaggtatgtgtcattatcctgatttataagtgaggaaactgaggctaaaaaatgataagtagtgtcccaaagccaatcaaaaagtagctcaactagatctatccagcttggaagcctgcaatttgttctctgtgttttggtcacgctcagattctgaggactgctgcaaaaatgttgaaggaggtgctacccacaggtcccctgctgtccttctccagcctccaccatctgcccggtcctcactcactttcctccctcttcccccacattgtcttttggactctggttgactcttgctgtcctctggctactgggattcatccatgcacattagaacccagttaggtcactaaccctttgaccatcacagcccagctgtcatatccctccctagactcatctcttccctggccctttcacctccatgctgtatactccagcaagacttagcttcctccagttcctccagcacctttctctcctgccttcttgcctgtgcgcaggcttttccccaactggagcaacttgctctgtctccacctccaggtctcagttgaaacatcacttcttcctggaaagactgctgactcctaggtatttttcccctaatttataccaccgtggccagggcttttctgctatgacggcacccagcacttggttggggttacttgtttgaattgttgggattccttttactggccagactggaggaggacagagagcacgtccatctgactcaccacagtccagggctaagcagggttgccggtacatggcaggcactcagtagacaatggctgagtgagttatgtcaataatgggaccgtgcttaaatgtggacatttctgggggctcagggaataggtcattctgtgggccagacaaagcatgcaagtgagcagagctggcccttcgcctacaaaataccgaagaatattcttcaatatcacaagaaagtatcttttccatcatttttcttgaaaaatgcatccctcctgatctatctttcatttcctcacatttaatagagatgtgaatacagagaactatatctctactataagacaaatagcaccctacgcacagtaatgacagcccaagtagtctacttgtaggaacaatgaaaggaagtgatgggggctggggtgaatggaggtgcaccgagcctgtctaaagaggctgctgcttctcaacctcagcctggtattgcccaaggaaatgtgaaccagtgcagccagatttcctgacttcaagaggagctggaaatcgactgtatgcgtaatgtcccaatttttaagagctgcctcaattgaacacgcacaggcacaaacaaaaacaaaataaacaagccaaatgcaacatctgctgagaggttttggttcttggattgcaacctctgcacacattttcccactaaataaagaaaagctccttgcagatggaccccggtgggacctccaatacccggaatgcaccgaatggctgggatttgtgtggccccaaaaccctcccttcttgcgctcacagtgctttcttgaagcttcagcaaaccccagcgccaaaggaaaaatatttataacctgactaggcagcgcttaaaagatcaaggcatacgtggtgtgcagaaatcactcgcacattgttcctgtttcctctctgccataggatcaaatgcttccagtttcaatgattaatcgcctctcagttttcaccacaagttgtacaatgttattgactgaaacagaaatattcatttcaggactctgctgctggaacaaacacaagctctggggcggggctgatgatgactgatggcacaggttgctgcacatgtttctgtgctatcggattcaaaccacccctgagactgctctctttacagatgggactcagggaagctcaaacaactatccaacaacaatcatttagtgtgactttattaatggccactatccatggaatgtttactctattccggatacggtgccaggaacattacctataccatctcatttaagcctcataacacccactgttatatttgggaaggagccttggcagtaacattttatacttgaaataactgaggcagagaagcccaaggctgctaagcagcagagcagaggggccagtccccagcccagagctcccacctcggctctggcattgctctcctatgcaagaccctgacacagacacacacagtcttttccaagctggctgggcaaggaacaatttcttttgcagaaactcgagttactacaaggcttctgtggacagtctagggtaatattggtactttaattatgcacctggtgtgttatctatccttgggagttgggaaaggtgatgctctggcggtctggggaaatctgccctctgaaattcgagcactcttgaatctcttgcctggggcccaattgagcatggttgctctccaggaatgtcccagggcagtgcctctctaactcaaatcctgggagatattctccagcgtctatgaattctccaggtaacctctttacaaaatttaaaatttttcatcaaataataatcatgtaaacatcaatttactattttaggttgtctgttttaatcaccttataaccatctatgttgggggtccacaaactacagcctgtgaactaaatcagcttccaacctgttattctaaggtctactactgaagaatggcttcatggtcttaacccattgagaaaaaaaaaatcaaaagaaaaataatatttcatgacacttgaaaagtatatgaagtttaaatttcagtgtccataaataaagttgtattgagacagcagttctcattcatctgtagctgcctttgcaaaaaagacagtggagttgagtcattggaacagagaccttatggcccatagagccataaatatttactatatgggccaagacagaaagttggacaattcctgacctatgcaatgtgatgttagtggcttatgtttgtgcttccagctgagttgggtactctgtctgttgtggttttgttcaagttcttggattgcaacctctgcataaattttcctgctaaatagagaaaaactccttgcagagggacccaagtgggacccccgatacccagaatgcaccaaatagctgggttttttacttttattgccatagggctaatgagaaaaataaaaatagaggaggactcaggcacttagaacatttgcagctacagaaagcagtaagtcctcacattattgtctacaggttctttgatattgcaactttattaagtgaaaagacatataaagaaaccaatttgaccagaagctaattgaaagaaatgagttaagttccttgggcatatttctgggcacaaaaacatcaccaaacttctaaataaagacccaaaacacttgtaacactaagcattaaaataaatatgagctatacatgcatttaagaaagattaagcaaaacaagtcagataattatttacccaagtttggtgaattagcgagtgccagcagtcatagtggtggtctgttggatcaaggaataaatgtttgaaagcaaaagttgtcaggagcacctcctcctaccacacagttcaaaaacaattacagatatggcaggctcgccaagcacttccataccacatggtttattgccttgcatttgtacgattatcttctgctttacaaatttttattttacaattacttttattcattgactgattcattttccaatccacttattccagttcagggtcacaggtggttggagcccatcccagcagctcagggtgccaggaaggaacccaccctggccaggacgccatcccatggcagggcacactcacacacacctacatactcacactgggaccacaccagttcacttcacatgcacagctctgggacgtgggaggaaactggagtccctggagaacacccgtgcagacatgggggaaacgtgccgattccacacagacagtggctctgccagggtttgttgtttgtttgtttgtttttcatcaatgttatatgaagcaacagtattcgaagacctgctgtacagctttccagcagttccaggaaaaaagagccctgggagacttaagccatcacagtacaaggcagtagaggcagggtgaaatagaatggaaaaaaaaaatgtgaacccacactgcagtcatactggaagcagcaatcccatttcaaccaaacaacctcacattaaactaatgttgttaatttgaagtttattggttttgcagtcgtatttgtgtttaatttggaaatttgtttcagttttatagctgaataagagctaaaaagcataaggattttatacctaagttttatgtctgtacatattaagtaacattatggtaaagtcaacacttactgaaaatgtcccctttaatagggcatatgttacttaagtttaagcaggaaaaatgggtttaagaaataccaattgtattatatctttaaatatgtgtgagctgttcaaagttgccacctggcagaaaattcaatctcagttacatagggaagttcctacccctttctaggaaagggtcttgttaaataagaattctaagcttaagttggagacaggttcttgggttggggcagtgatcattttttaatcttgcttgtatgcctacactgcttttgtgtgtgctgatctgtccatcctttaggctgtgctctgcagaatggctcaaaatcacccctcacttagtcctcccacttgcttcctttgtaccccctcagcccactttgcttcttcctctttcctggacaaagggagcacagttgttctcaacgggcctttagaagcaaaattctggcttgactttccaatgtgggagtgggagaggactgctaaaaataattggtctttcttcttagcaattcaccttattacaactgttaggtggaaaacttttttttcgttttactgaaaagtttaacccaggcactgaagagttagattgtatggacctcttttaatcatctgctgagttctccaatgtatcagttagctattgctgtgtaacaaatcaccccaaacgcaatgctctacaacaataaaaatcatttattctgctcactgcctgcagtttattcaggcattggatgagacagcttcttcctgctccatgtggagtcagctgggtacttgaactgggacatggatgatctactttcaagatggcttattctcagggctgccaaatggataccggctatcagttgaaagctataagcaggggcactctgcataagcatggctcatctctacaaaagctcctccccagtctccttgtttgggcctcacagtgtatggtaacctcagggcagtcagaatgtgacaactaaagacttcaggagtaagtattccaggaagcaagatataagctatgtggccttctaagacctagcctcagaggtcacatagtgtaacctctatcacaccctattggtagatattgtaacagaagcccacccagtttcacagatggggacatagactccatttcttaataggtaactggccagagttgtaaaagagcatgtgggatggaagatattgttgcaagcatctttagcaaatacaactggacatacccaatgcaagcacaggattgatcctccactctgcccccataccccatgatttattagccactcggacaagtgacttcaactctccaagcctctgtctcctccactaaagtggggacaaatgagtattacaaatgagaccattaaataagataatacattttaaaaattaacctggtacctgtcacaaagtacatgcctaacaaatgtttgcttctgtctcacttcctcaatttcatctcagtcaacctggactgactcaaaatggcattcttcttggctgccccctttgaagtatttctgctgagaaaatagtttctgtgtatttgtaaatttacaggttgaacatagatcattattcaagcattgctggtcgattcgtcttttcaaaggcgggagctgctggctgtgggaagggacccagcaggggtctcttgcaaccctgctctatgggtgggggaaatctggacctccctctggtggggttgattgaagtgaagggtcaccatatgtctttcccaagagggtgactgacttcctgctttggtcccagtttccctgagattttcctgaaagcccttccggctagcccagttgggagtgttagtacatcagatcccatgctttggtgaaaaatgtaaacacagacctgatttttcattttaaatgaagccaagcatattgctcccagcagatgccgagtgactcaatctgtcctctcggttctgaagggaactgaagaacaacatggtaaaataaagcaaacagcacatttattggttgataaaatgctgttttagtctaccctggcattatatggtgattgctatgtggcgaacatctgttattaaatccagacttctgttgcctggatacattgagtcaaaagctggagcggatgagaaatccatttatgcgtctgttgcgtgtgaatgtcagagctcatatgatgcctttgtcttcattctaactgaatcttttaatatggaccgtctcacttgttaattctgactcaggggcaataatgttttcatttgattaaaaaaggttaaagaaacaaagaaacagtgttttctcaggtgctctaagtaattctgttaatgaattttcggagacagcgtgtgaatttgaaaagagtaggactttttaaagagttcatactatgaacccaataattcagatcctagggccttatcctaaggacataatagaaatgagcacatttataagaacaaagatgttcaatgaagtgttacttacaacagcaaaaaaacttgaaagtcacctaaatgtttgtaagtcaagagcttcattgatattgactgcaaagtccatgttattccatgtgacgaattttttaatcaatcacctcttgatggattttaaattttttacaattttttgctatcctaaaaaaaatgtgtcaatgaacaactttgaactaccctgactaccactttaggatagattgctagacgtggaattactaggacaaagcctatgttataatattcactcagtcaacaaacatgtcttgagtgcccactatgtggtaggcaggctttgctctaaacctcagaggccccgtggcagatgaaaggctctcaccttcacggagacaacagagtgagaaggggggaaagaaaactagaggaatctagtagacagtagcagatgctgaggagactgagaacagtggaaaggctacacacagggatctctgagtgccatggttcagagatcattgaatgaggtgagattcaaagagtctgagaaagtgcctgatagaagaggatggttggctctggagggacagaagtggagggtgggagtgggggaactggccttgcctgagtgtatccaaagagcaaatctttctcactgggctgactgacctcgagaacaggcctatggcccttgtgtttcttcactgccatcagaaagactgtgcacatgaggagatggaagggactctcaaaagagagaggggatcatcagggatgagatccgtggagaatcaccgcagagctggcagcgtttatctaagaatgtggcattgggaaaagtggtgcaggctacattccaggcgataaggaccaagcaatgaaataacaaataagtcatcttaaagttaaaggagatggacaatagacaaacaaatatgtttcaaaacatgataaatgctatggaagaaataaagagggttggagagagggttctacttagatagcctgatcagggagaatctctctgaaaagaggatgttttggctaacatatgaatataacatatgaatattgggaaagagacagtcatgaagagagattgggagcgtaagattccaggcagaaggaatagcaagagggagggccctgaggtgggaacaatcttgatatgcttgagggacagaaagaaagccatgactggagcatagggagttatctggaaaatggcaggagtaagtgtatcagtcagcaattgtcactgtaatgctgtgtaacaaaccatccaaacctcaatggcatagtagaggtagctgagtcaggactagaacccaggcatgattctcttcaaatttttctctttccatccatattcactaccttcctatgtacaatccactttctcttaaagtcacagcagcctcagaatgtattacatacataagaactagtcctacatctagatgtaatggctttcaaacctttatgagcataggaaacacctgttgagctggtttagaatatagcatttagggccttgcctccagatagtctgatttcacagaaacctgcattttaaaaaaatcaccccaaatagttatgatgaaggtgatctatgtacgacacttagagaatcagtgatggaaaattcaccaagaacagccacaggcaggccagaagaatggccctgcccctctacttttaggattaagcagaagctggccctagatctcaccagttaccagtgatcttgggcatttttagcatcatgtgcattgcttcactgtgataccatcttgctggcacagccatggaaagccatgagttaatgcatctccccatgtaacaaacctcccctaggactctggtccacacctatctctgctagattctctggcattgcaagaaattcttcagactgccccaagagattcgttccaatctaggggctccttatccccagctcagagctggatttggctcttgcttggaggcgggaagccctgctgggccagggcttagaggggctcacaagaaatcaaagcaagcattctccgcctctctcctacagccctgcatgcatcttctctgatcccttgcctgagtggggggtggcattccaaaagctcattactggcttacatactttgccttaaatcagctcttaaatgccctgggatgaacagccctaaataggaaagaaaaaaaaaaaacaagtttcttgcaagttcacagatatgcttggtgctttctgtcaggctagggtgtagccttctctgttctaaatttgattttctgagtctttaaggaaaaatggctactggtcccctggacgctgattgcttcagcatctgaatctgctccatcacttctacctccacccactggtccacgtccagtgggtagaggtaaaggggatggagatatcatttatcttcaaaggataaaactgctctgagagatctttgctttcttagaaacactgctggaaagttgtttctttagactacattaacagaagtaccatctctaggaagacaaggtggtaataactaacatcaaatgagcagttcctatgtaccctgtacatgtcttagccaacttcatccttgtaacaaacctggaaggcaggcactgttatcactcttattcccaggtgaaccagttgaggttccaagaagtcttttgtgcaaggtcatgcagagttgaggcccccaagtcggtagacttcaggagccagaccctcaaccccctcactgcctcccgcctcatgctgcactgagcagaccatacccggatggtcatgttcaggttggctatcaatgcagaccacgctgggcatattcaggggacggatactcagaactatataacataaggaatagaggaaggactggaggatgtattaacatgaagaaaaggtagactcatggcaggagatgagcagggtaaagaggtgcaagacataaaaagccaatttcatatacatgaagatttatcaagagccagaaggccctctatgggtccaagagttacaaggcctaatgaggtgaattaatgccagcatataaggaaaagcttttgaatactcagaagtgtccaaaaaggggtcaggctgccttggaaagtagtaagctctccatcagaggcttggcaacttcttattagggatggtatgagtatctcaagtacagatacagatgacccaaataaccactgaggcacttctgaccccaagtataagagattctattgtaacgcacaggagtccatctcaagcagcacactgagccatctccttgataaacctaaaggtaggtattattcctcccagatgctgtcttcttagcctgggatgcaaaagccataggatcacttcacgtccaacccccatcaggtgatctgtcatgaatcacaagttattggagccagatggaactacagagctaaaagatacatgaagacaccgaggcctgcagacagggactaactttccaaggtcacagagctaacaagtgtcagagtcaggctagacccaggactcacaagttgagctcacaattagttccacttcctacaccacctggatcatgagtgtcaagaatgaaggacctttggcagtcttctcatccagcagtgacaaacaggatgcacttcatgtgccagcttttaattcattggtcatggtttcctgaagtgctgttgtccagaaatattctgaggccatatctggatccagtggacatgagtgaatcatttatgatgtctgctttggacacaggtggggaagtgacaacctgtgtaccaagggtttggcagccttgagctaatccatcttaatgactttctgcacatgctgcctggaagtgatattaatattgcaaaagagattataatgtgtgataacgttgtagtacctcacttattaaaataattcaaggatccatctttgatggttaaacccactgtctatgtctgtttgtgttcctacaaaggagaacccaaggctgagtaatttgtaaagaagaggtttatttggctcacagttctacagactgtcaagaagcatggatccagtgtctgcatctggtgtggacctcaggctgcttccattcatggcagaaagtgaagaggagctggatgtgcagagatcacatggcaagaaaggaagcaagggagagggggagatgccaggctcttttaaacaaccagctcttgggggaactctcttaggactaatagagtgagaactcacttcttacctggacaatggcaccaaaccatttatggagaatccacccctgtgacccaaacacctcccatgaggccccacccccaacactgaggatcaaatttcaacagatgagatgaggaggatcaaatatccaaactatagcacccacctaacgaatgcaaaagatgtgcagtgaccttaagccccaacaatatagagcagatgacagttgatatgtagatagtttgaatgacagtttaaggtagcaggttggcaggtggctccaccatatacttgttgagtagtcctgagcaggtgtttctctgagatcctttggctggtctgtaaaatgagagataatgactctctcacaaggttgccatgagaaatagagaaaataccaagtactcagcatagcctaacatttagcagttgctcaataaatgataggaagtattggctttataatattgcatctacccccttctctctatgttagaacctttccaggcatttaaaaggtgagcagcaaaggccacccataaatgtgctgctagagagcacataggtcaccaatctcagactattggtctgaggcagatttttggagtctcttattcccgaagagatccagggacctgctttgcaggtgactgagaagaccaaggccaggagggaaggccaaaaagctccaagcagatcacttatctgtataacacttttcaccttccagtccttcttcatggagtttcccaaagtacacacccacagtcctacaaattggggaagagccagaggcaataaatgtgtgggagcagtcagctgagaactggatgttgaaggattgtacattttcttgaattacatgggagcaaactgcctcctgagcctgctgtacccaaatttatcaaagcacaaagcatttttaaagaccatttaataaactgattaaatgtatttgacaacggagctagaaagccagtcaattcatgtcttcatcactcctgagaagttgcctacacgataaaaatggaagttctctgaatctgtgggtgggagggctttcactctcctaatggaggagggaaaaccagggcatgctgggaggccgtcccagcccatcttcctgacatcgctgcttttcctgtactgtgctaagtgcagagaaggtccagcgccctgcctgtttttcacttgcattcttgtctccagactttctttctctccccacccttctcatgaccactagcatctaagtttatcgcttcctctctgttacctctgtatcctccaagtacatgatatacctctacagctcatctgccaatgctgcaaagtttacttatttataaccttcccagtgccttgtgtatattagatgcaggagtaagatgttgtgatcgagatcgtggtggtgatgatgatgatggggagggagaggaagaggagggggagaagattaggcaagaatgtaaaagccctcatgggtcttggaaatcacagcatctaagttctctccttcctctcccctccttcccctggtttagagatgctttagctagcctaagggcagaatagcctgcctcttcatttgttcttcaaaatccattgtttggggcacaaaatgatcttcagagtttaggctcttgaggctcaataaacttaaaatcttttctcagctttcctgttagatcacccacccccgaggcaatgaatgctgctgagctgatggaaaaagggcggtgagaaactccagaaatattttccggcagtgtttcttctttatctctgtcccccagtagctcagtgaggtaaagataatcatcagtttttaattttttatgttattattgtggctgcataacagttgtacatatttatggggttcatgtgatactttgataccagcatgtaatgtgtaatgatcacatcaggtcgttattttaacactgaggatatggatgctcagaatggacattggcctcactgaggtaatgcaggggtaaatggaggcactggatggggctggaacccccatctgtctgactcaactacctgaagatggaatatgggttgtgctaactaaattaatgagtagaggctgcctgaggcgctgccttgagaacagttctgaggctgcatctgaacttggtgagaaaagaagtgctgtgatctattagtaatgtctgccatgggcactggacctgggagcagccacgggagccatgccatgatccccagactccgtgcttcttagaaattctgattgttgtttgttcaatagataaatgaatgcagaaactgcttccttaatgtaggcttagagaaggggattggagtaggaagcaagagaggcagctcctgggcctgttcatggtgtgtcgggaggccaggctggacagtaagagataagaacggcaggggagattgagaccagaacttggaaaagcttacaatgccaaactaggaagcctgagggtcgtgaaaggtttgggctcagaggaataagtaagaaaagctgcatttaacaccaggaatctggcagggacacgtagagtcaaggagacagaaagaccagcttggagagtggttgagtctgcacgaggcgtggaggggtgcccagcccccggcagaggcaggtcacagtgacaaggacagaaagcctggagggacaactccggggacttagtggctggcagaggggactcttttccccagtgactcatatgctcctttttttctagctgaatttcagttttattttcagctccaatcagtggcaatagaggaatccgtgtgctttatttctcctgctccacattcctccccacagtctcccagaggctaacattctcccatcctccaaagagaagaaatccacagcccagagcagagcaggcctggtggcttcatgacagtcatcagtgtggccccatctactagtgctctccaagtccagcaatgtgttaaccctttacaggcattatcccatgtaacccctaacagccctaggaagtagacactactagtacctataattcacaggtaagaaaactgaggttcagaaaggcaaagtaactggttgagggtcacacagctaagaagtcgcaaagccagagtcgaaaatattcaaaaccaaaaagaaaaaaaagaaaaaaaaatctgagttgaaagcttgctctcttaacgatatagctctggcccaattaagctataaaatgtcacaggtagcagtgtccttagagaacacctaagctgagaactccctcatttttcagagggggggatctgagggtcagtgaggagatctgttttgtccagggtcatcagtgagttaggggatgagccgggacttgaaccctacagtggaagaaatgtgagccacagaacttaccatgttgcttgttgacttcctctggcacattccactgtattttccccgaagcctctccccagcctctcagccccactcctcgtggctccactccctattactcagaggtgttcagctccacccactagtctcccagcatggcagtttctgcccattacaggcctacaatacctgcgagcctgtcagccccctgcctcccacctctcaccccccgccccggaaatggttctgttgttaccggaccaatcagggcacccagcagcgtctagaacttggggctgataatggcatcgtgaatagaggaaattagagctgaatgcattcacagtgaatattcctcccagggcagacggggccattcgctgagtggcacatgacagatgttcacatggaacccagtcgcagggccaccttcactcctttcaccagcacggctgtctcccagccctggccgtgctttagagcactctgcatccccaaccctggccctccaagccctgcaggagccagtggttctgcatgtctcctctagtacctctcaagcacatggccttggccctgaagagcgtagtggttgatcgcacagcctttggggttagatgtatctgcttccaagtcccaaccttctgcctcactgctgggcaggccgggcaacatgcctgaatctcagtgcccccatctgtaaaatggggataattaatacccaccccacagtggtcatgtgaattcaatgtgattatgagtgtaaagagtttgtccccatgcctggtatacagcaggtgttcaataaacgatggctattatgatcatcgattgctctctgtcacctgtgtatcctccaaatgcatgactggcctctgcaattcatctgcctcaaagtttacttctttgtaaccttcccagtaccttgcatatattaggtgcaggattaaggtgttgtgattgagatgatggtgacgatgatgatgaagatgctgatggggatgcagaggagggggagaagattaggcaagaatgtaaaagccctcatgggtcttagaaatcacaagagggcaatttgttgcagcagaaattgaattacctttggagttatacagatgtgctgaaatttactgtcagcaacaggaaactcacacaccctgccgggtccatgccacattgttctgtgtggctggggaaagttacctcatctctctgagtctgggtctcagtccctcatcttctccagggctgttgttaggagtgaatgaagccatgctcacaaagtgcttagcacagtacttggcctagtgggtgttcgattcacagtggatattgctgttgctactcttgtcagtatatttctgatctccccaacttacagatcaccactccccttgagagcagagttgtacacttcattgtgtgtgcttctggagggcagggatggaacatccattcatttagtcaacaactgtggattgagcagtgtctctatgcctgccactgtgctcagctctgaccacacagcagtgaacagaatagatgagctctctctgtcctcatggagctcacagcccagtggggaagacagatatataggcaacaagtttttaattgcaagtaaaggtgccagccccaaaaaacaccaagtcacaggatacagaacaatgtgggatggaccgggcagggtgtatgagtttcctgttgctgctgtaacaaattatcacaaattcagtggcttaaaactaataaaaatgggccgggtgcagtggctcatgcctgtaatcccagcactttgagaggccaaggtaggcagatcacctgaggtcaggagttcaagactagcctggccaacatggtgaaaccctgtctctacaaaaatagaaaaattagccgggtgtgactgcaggcacctatagtcctagctactccaagaggctgaggtgggagaatggcttcaaaccatgaggtggaggttgcagtgagccgagattgtgccattgcactccagcctgggcaacagagcgagactctgtctcaaaaaaaaaaaaaaaaaaaaaaaaagctaatataaatgtattatcttgcagttctggaggtcagaagtccaaaatgagtcttatgggactcaaatcaaggtgttgtagtgctgtgttccttccgggggctccaggggaaagtgtttccttgcctgttacagcttctggaggccactcacattccttgtctcacggccccttcctccatgtcctaagcacatccctccaatctctgcttctgtcatcacatggccttcctctgaccctgagcctctgcctccttctgagaaagacccttgtgattacatcaggttcacctggataattcaggataatctcttcatctcaaaatccttaagttgatcacatctgcaaaatctctcttaccatgtaaggtaacatattcacagcttctggggattaggacatgcatccctagggaaccatgattcaacctagcatgggggaacccactacaggcaggtgttgtccttgccatcgccagctcagtgcttggcacagtagaggccatggatattcattcagagagagcatgcactgaggcaagcctgacctcaagatcaagacaggaaattggctttcatgggttaaggacctgttactttgctcatcaatgtatccttaatcatcagaggtcagatctgctggagagtgcaatctttcagtttccaaaagtaagactggatgccttagaacttaaagtcagggaggtacccaagaaagcaatcatagactgagtccccatgcagtgcactttctcggatggacaatttctctgttctgacagtcactgttgactccatttctcagatgagggaccgaggcacagagaggtgcagtcagtcacctgaggccacacagtcaggaagtggaaatccatggaaactcatcatcagctgcctcgcatcagggccagtgctctttatctccaccccacacattataaagccactcagctttacactcaagggaacttcctatttccctactggattatatgtataatttgtagtattgcaagatttgaacagaagcgagcagcagcttgtagttgtgtgtgtcactcactcctgcctgtggggatgccacgtgattgtttaaagggttggaatcaggagaaaggcaggctcagagcaggaccaagagagagcccacccctcgcctccccaaatccttcagcttcctgaagtgtggctgctgggtagcagctcccccagggaagaaaatataagatattcccaagggaccctggaagctttatcccaaggcttcacatgtgtaggctgtttcctgtgattcggtctggctgtcaatgatctaagattgagagccaaggtcagtgaggggggaaaagggacatgtagtgcaggggttcagcatccaggcctaggacttagactgaggctctttaccctcctctgtttcttgctgatggccttaggcaagtcgcttcccctctctgaccctcagtttttccctctgatgaaatgggtgtaataattgtgcctacctcttcagggttgctgtgggataaaatgagctcatacttacttcttttttttttttttttttttgagacagagtctcgctctgtagcccaggctggagtgcagtggcgcgatctcggctcactgcaagctccacctcctgggttcacaccattctcctgcctcagcctcccaagtagctgggactacaggtgctgccaccatacctggctaactttttttgtatttttagtagagacggggtttcaccatgttagccagtatggtctcgatctcctgacctcttgatccacccgcctcggcctcccaaagtgctgggattacaggcgtgaggcaccgcacccagccagcgagctcatactttcatgttagcattagcatagttcctgacaataagaaccaaatacgtggtatctgctattttctgttttaattaggtattcagagtctatgttaaattaattaacatatatacttatggaacacctactcagtgccaggtattgttgtagatgccaggagtacagcagggaataaaacaacatccctgtcctcgacacaaacacacaagtaaatagagaaggtcagagataaatgctgtgcaggaaaacaaagcaaagtgagggatggagagtgcggaaggttggggcacttttgtttcagatgagtgtcagggaagcccccttggaggaggcactgtaagggcacagactcgaatgaaaggagtatgtgaaggtgcttaaattgtttctgtttggtttggtgtggtgtgatgtggtgtggtgtggtgtggtgtggtgtggtgtggtgtggtgtggtgtggtgtggtgtgatgtgatgtggtgtgcggtgcggtgcggtgcggtgtggtgtggtatgggttgaggctggccttaggagcctgttggccttccaggccagtcctgaagcccagcccagagcaccagactctgcagtcagtcagtggagggcccacatctcagccaatgcatggctttgggtggtgacttcatctcccctagtgttcctttccccctctgcaaaatgggaatggggatggctcagaactcccagcgggagttaggaggaataatgtataggaagtatgagcagagtgcctggcctggagcatagcgcatggccgatcataggtaagtgctggtgttgattttattggacacaagtttggaaactcagagcctgcagggatggccttgaaggtaaagaagaggtagttgggagttttacacttcccaggacctaccctcagagagacaggggtcattccagagtatctggatacccagtttgggccaaagatacttccagccagggcactcgtcaaccaccttgatatttgcccaacacagctcctctgaggagagcttgaggtctgggggccccatgctgctgattaaactgatggctgggaggcaggtaaagcaagagtggagaagtgagtctggaggtggaaatgagatctccaaggaggggatggctgactgaggctgacacgtttctatccaaccggtagaggatttgcagttggactctgctttatggcttggtgatggtcagtgttggggcaggcactaggtcagagggtgatgggaggggtgagggaggttccagtctcacgctaggctgcctgcaccttcagcctcagctacctcaccacctaactggggaggattaactataactctgaccattcctgggactgtctccatttcaaacaatcagatcccctgccagactgtattagtcagagcagtgcaaatgctgtaacaaacagccccaagtgtctgtggctgaaaccatgacagtttacttctcgttgccatggcagccagtgcagctcagagtggatgggcatgtctgcatctgcatgcatgcaggctccttccatcctgaagctccccatcctcgcccttacactgctggctgggaaagggagcctggaggaagcctcaggtttgtatggggcaggcctggaagtgaggtgcaccacctccactcctatcccctgggccagaacttgggcatctgaccacacagacttcccttggaaggagaagagaacaaggacactgtgcacctttgtcaagccaaccaccatgcccatggagcatctactatgtgcagagatgtcagctcctccagacaatgttctctgtcattttccatctgttcaagctgagtcagaggtgtgtacatgtgcaaatgcgaacaatccaggctcacttcctgcttccctgagtcctaggctaacctctagcacagcacagatcacaagagtgatgactgcctgaccgtgtgtccttcctcccagtagagtttgagccacatggaggcaggggccacagcctgtattctcaggacttggacagcggtggaagctctacttagcttgctgaagaggaaaggggaaagaaaggagagtgaattggcacttgtcgagatctcccagttcgttttttaaaaattgtggtaaaatatatgtaacagaaaatttaccatcttaaccattttggagtgcgcagttcagtaccaccaagtaccttcacgttgttggacaaacttcaccaccatctgtctctagaatgttcttcatcttgcaaaaccaaaactctgtacccattaaacgactccccattccctcttcccccagctcctagcaactaccattctattttctatctctacaaatttgactactctaggtacctcgtataattggaatcaacagtatttgtaccctggcttatttcatttagcataatgtcctcagactttattcatgttgttgcatgtgtcagaatttccttcctttgtaaagctgaataatttttcattataagtatataccacactttgtttatccattcacttgtcgatggaaatttgggttgcatccacctttttttgctattgtgcataatgctgctatacacatggctgtgcaaatatctaatattagtccctgctttcagttcttttggatatgtatccagaagcagaattcttggatcatatggtaatcctatttttaattcttttaggaactgccatattgttttccacagcagctgcagcattttacattcctaccagcagtgcacaagagttccaatttctccatatcctcaccaacacttgttattttctgttgctgctgtttgtttttttattaatagtcatcctaatgggtgtgaagttgtttctcattgtggtttgctttgcaggttttgatttgtagattttcctgatgattagtgatgggtgcatcttttcatgttcttactgaccttttatatatctttcttggagaaatgtctgttaactctactcatacttttgtaaatagtattcccaatccttctaactccccaatgaggtggatattagtatgttcgtgttacagtaaagccaactaaaccttagaaagactaggttaattatccaaggtcacacagctagaaaatgacacagcttgtattgaaacatcagtttttctctttccaaacctaacgcacatttcatgaaacctacattattgcaccataacatcatgttgatttacttatctgctctcctgcctgtcccatctactacataaattgagtgtggtttgaaatcagagactacttctcatctttggcacagtggcagccatggatcagaatctcttacatgctggataagtggatgcaagctcaaggccacacctaaagtccccaggtgacttgatcacttgagttagctgctggaaacctgggcttcctcttctgcaaaatggggagagaaaataaattctcagtggattgtttagaagatttgagcaaagacctctgcaaagtgctaagcatgtggctagcatgtggcaggtgctgcctaaatagtagaaattaacactgccatgcttataagctccggacaaacacaagaagcccgaaacataatctgtgccttctgcttgcattcctcctagttggggatgtaaaatagcccagctacaatcaaagaagaaaatcaaagtcagcacagactatggatatgcttctatatgtgtagattatttccagactcattcggaagaatctggacatactggttgcctcagaggtcaagaaaattggctcatttacttctgtaacttaatttcgactctctatgcttttacatagttggaatttgccatgcacatatactacatttaaaagagcgtgtacgcgagaataatgtggtcaggtggcctgatccacaggtgggtgggagagacaacagagacagtcttctgaccccatctggcttctacctgccaaccccatgtattctggagactctccacacctcctggcatgaagcagaatccctctcagggggtcacctcacctccttccagaaatgtttaacagaaagaacctaccattggctttctccatccccagcacctaatagagatatcacggagaggggagcatttgtaatttactttggaggggtgtgtggaggccgagtaacaccgccttccatctcagtgacaacaaactcattcttcactataattaaaatgtcactttgataaataattccatcagcccccttccacctatgaatagcttcttgctataattgttcacattctgctgaattagaagtattcaagggagaatttaagaggtatttaggcaacaaagataaatcgggtgtgttttccaccctcccacaatccctcattaagcgagacatcatccccggctgggcagggcggggctggggggcctcatccctgtgttctcagtcactctctccctgagtggagggagccggaggggttgccacagcagcgtggacctcaggaaggggctggagtttggggatacatgtttgggggccttcccttcccagctattactgtagaaaaagaagaggatgcctgaggtggtgggaagaacgtaggctctagcttcaggtgagcttggaaaagtcagtgaacatttatggacctctgttgtataacagaatacaagatataattcttcattcaatcttgtgtcaagagcttgagtcaagatataattcttggaagagacatctgacattgagggtcccccctcccatgttatgggactcaagtcttccaaaggatgactttccctaggagacacagctagagattggcaaccccaggacctttgaatattcaacaatacccagtagggtatgaagcaccgtaggagttccgtgactattcccatcttccctcatttttgttggtacctcttccttcctgataaatcacatctgctgggaataatccaataataggatgcacagagccagccacagtgtgttggacacctcaggaagtgtcccatcttgggtatgtctgtcctcaccttgggtagaaagagatggtatttgactctttccccaccagaagaggggtatggccatgtggttacaagagcagcacttcatagtatgaaagccagggttccaagacaactactcccagtgtggggctggcatgttagtgactctaactacagtttctttttttttattattgtttgagacagagtctcgctctgccacccaggctggagtgcagtggcacagtctcggctcactgcaacatccgcctcccaggttcaagcaattctcctgcctcagcctcctgagtagctgggattacagctgcccaccaccacacccaactagtttttgtatttttagtagagatgggttttcaccatgttggccaggctgctcttgatctcctgacctcaggtgatccaccccactctgcctcccaaagtgctgggattacaggcatgagccactgcacccagcctaactacagtttctttatctgtaaattggaaataacaatagtcccactgatgagttatggaaagtagggccttccacggtgtctgcatgtggcaaacattacccatagctcctgttgggtttctcgtgaggagtgtaacagtttggccatgcagttttaaatgccacatgagcggctaggtgggagggagtaccgggccaatccaactcagtcaacacaggtcccccacaccatttcctctgtggcaggtataagagtcaaggcccacttcaaggccaccaaagtccaagcatctccccagtcctagcttccccagagagtcctgaatgacaggtattcattggttgtgatggggcttgtctggggttggggactgggggtgaggagtggggtggggtttaaaaatggagggcagcggtaccagtgaaggggaagcagtgataaaacccatttgagtttctgctctgaagcagagtccattaggatgacggctccttggaccagggagctgcgtctgaggggctgtgcccagttccatcagtggtgggattgggagtggtccatgaaaataactcacatgcatgtgtggctggctgaagaagcagagaagcctgcatgggcagccaatccccatgctgagcgctttgcttggaatggctctgataaagaagcccatgatgctggaaggaagggctccctgcaggaccctctgggatgattccctgcccatctccaggaccaccctccagaatatggtctaggatggccttgagtgcgtaggtttcagaatgtgggaagaaggggcaaggagaaaaaaacaagcacctattgatcacctgtgttagctcattcaatctttctaacatctctgcaggttaaatattctatcccattttacagagggcaagctaaaactgagagatctaagatgattttgccaaggttacactgctagcaaatggttagatttgaacccaagactctaactccaaagagccaagctctttacagtggatcagtccatcatctctttacattttacaagtttgtgtcatggttttagacaatatgtttgacatgcaagacgctctgctaaccttaatgaaggtgtgcatgtgagatgcatgtgggagtcagtgtctcgggtggtgagcttcatccagactcatttcaaactagcttgcacagcagagcttccagcaatgcaaatgccaggttactcgaggctccctctaagatgcagggactcaaaaagttgtttctgaagctccagggcctttataacggggcttcgaaagcagcagaaagaaacagcacacaaagtgtttgtttattctcttgtattcaagaaagagccaataattcaaacaactaattctagaagaatagaattcccccagtccccaccttaatacaggcaggctcacctgtccattggtaagtcagcacatttctctgtgaacactgatgccctgtgcccatcacacccatagtatcaactgtcaggacagctgccagatgaaagtgctgtcatcatgggcagctgcctcttggaccaggagctaagggagaaactccttccttagagacccacgccagactgcagtgttgtttgagagacctgagtctctcagggatgtgttctggagatctgcgagcaggactgtatccatgaatcaggactctgtcttaagccacagtagggaagaggaatggcacaatagaggaaacaccaccccacgtagcatggagccatggagagagcatgagtttagaagccaggagcgccagctctgccagctactggccaaaccactgggggccagtgcctcggccatctgtgaacagacactgctggataatgatctcaaagctctcatcctgtctaacaccatccagtttgagacctgcttaatcagtggggttctgggaggccagagctggagctatgatcagggctaaaatgcatacagaaagcacagatgctagaagccaaatggaggttgtccagggggtccccaaccatgggactggaagcagatgtcaaaatcaaggatcagagcttctgggaagcagacacagcaagggaacatgagtagtgtgagctcacgctgagtgagcactggctgtgcaccagtattgaataggtattaactcccttcagctgcacaattatgctgtaggtgagttttaccttgggaaaccaaggcacagaatttaagtaacatattgaagctcatgcagctgctaacagggaaggccagggtctgaacccagctgatccggctccagcatccgagctctgaaccactggtctatcctgcctctgttaggacttggtccaatgtcatcatcctagaaggaacatttaggcccgcacggtgggtggctggttcaatccagtttaaaggccaggagcaggacagtgacttgcagctgcagcaatcctatgactcaaaccaaagcagctgtgacaaataaagggactgactctcattctcccgtgctagggaaggatgagctatcaggccttgttgcaggctgagtcagtcatcccacaaaccacctaagtgaaacctcttcactgagccttatttcctgagcgctctccctttatctgtgcttgcaaagaggcgtctccctccatgccagccaacccacccacccccgcacacacataccacctctggctggaactgacgaccatgggttttagaaatgagataaatctgggagatgaatgtattcatgagcccataaaggggtcatgaatcactggccccaattactgccttcaatcctgacaggatgaattccctcaagcagattctccttgtcagacaacacgggaggcagtgtcatggctgatctagagccacagataacatcattattccataccaggctggtttcggtttcccaagccacctccacttgatttacagctcacttctgatgctggagagagagataaatatatatatatatatatatatatatatatatatatatatatatatgaaagaaagaaagaaaagagagagagagaaagacacaaaggggaagctttcatgccaagtggaaacaagacaaaataaatgcaccgaatccgatttcaaaagctgtttgaaaactctgtccggaattgctggaaagggccccagcatccacaggaaatgtatccctgccaagccctgtgctactgaactctgtggcccccactcctgcctcccggtgacttgtttagaactacttcagatcggaacaaatcacagccaactgcagtcgctgtctctagcccttcaatcactcctaatcagaccgtgtattttagcaacagaatcttccctggctgaggagctcattcatctgccttccaccagctcgacaccctttgaatgggagatgaggggaagccacctgcttctctggcagccaagggaagctgggaggaggcaggaattgccagccctccctctctgatagatcaccagtgggagtccagaccagcaggaaccaggaaaggaggtggcaggtcagagagaaggcactgaaaagggtcatctgagtccatgtttggtgaatgcccaccttgagctggacacctggctgtggtccctggagttggatagcctgggttcaaattctttaactaccattttctggccaacccattctctgtgtgccccggacaaggtacctaccctgtgagtatagaagcaaacccccagaaaaaagcaagtggaaaaagcaaagaaccaggacatgggtggactcgagtcctagagaggctcaggaaacttttatccaaagacacagaggagctggttgcagaggagagcttaaactcacacagagaggggaggcctgggaggtgtcaacaagttatcttctcacttcagaagggccctctcgagaacagggatttcccctgctctgcaagggaccagtggacagaagtcagcagaggccatgtaggggcaggagcttcctgtcatcatagatgccaaagctgaagcaggatactgaatgcaaacaggccctgaggccatctgatgtgctcgttcccatagccccgctgtgtgtgtgtgcgcgtgtgtgtgtgtgtgtgtgtgtgtgtgtgtgtgtgtgtttggtggggtgggaggggaggcagaagaggaagagagggcagagagccaaagactgaggccccggcccataagtaaggcagtttgcagatctcaatatcctgtgcagacccacaggctgccgtggggttgagggctgctggtgtcttaaccagaggcagagactggaaggagcaccagatagaactgactcactcctccttcctctaccacatttcttctctgaaaatttgccattaatcacaggtgacgatggaatcagcaattaacatgagctaaaacaaactactaggcatacagtagcgctcaataagtgctagctattatgattacaatggagggaaaagttgtcaccgcagcacaccgtgcatccctttttggtctggggcctctcatccagacacaggtaagaagactcctcactccccgaggaatcgcgtgcaatgtcatgatggcatctgatttagttttcccacatctcaaatgagatcagggcaactagtcttactcaacccttcagacttacataccctgtgtatcaaggaatgagtctcccatcattggagacaatcaagtagagcctttctggtggaggagaaggaagtagacaagtggagctcagaggtgccctcccaccccgagattccatgatgctcaggactgtggaatgagcacgggagtgtgatggacctaggggtggggaagagcgagaagttcccgtgcaatggacctaggggtggggaagagcgagaagtcagaacactggcagaagaggaagaaaccagacaacctggaagccaagcagatgagtttcacctgcatatcctctcctcttcccccttcctccagcgttgacttatgggaggtatttcagtgaggacaaaagaggacttagtcaaacaagcacttattgaaagaaaatatattctacacagcacttccgtccttttaaagtgattcactccctttccactgcctattctgtttaggagaaaagtggagcttcttagcttggtgcccaaggtcctcatcaatcctaagatgacatttattgagagcacatgatgtgccaggcattgttacaggcaccagctcattcaagccatataaagacaaccctgtggtgtaggttctctcagggtcaccccttcagatgaagaaactgaagcccagaaaggtcaattaacttgctcagggccacacagctagttagtagtagagctgggacctgaactcaggtaactggtccttacgctactgttcttaatcccgtacttaagtcgaccagccctgccctgccttggctccagcctcaccttaagtttctcaccacctggagtttttggccaatgccacacggaatgaccagcatttctctgaacacatcatgctgtatttagcgtccaggctttagcacagctgttccctgtgcctggaattctcttccttttttgtttttttctcacccaaaaccagcttgtcctttaagatccagcttaatgttctcctactcttgggagccttttttggtgcccccaaccccatcaggccacgtagcacctggtagcaccaggtagcaccccatcctctgtgtgcccacgcctacctcctctctacctcacccaccctggacagaccctcacaccacacttctcacattacattgaaactgatgactgccttgtcatcttctccctggagcatgtcattcatggctgtctcctaagggcctagcttggtccctgcattcagtaggcaggtactatttgcaggggcaggacagcaaatggttagagcttaagctctgcatccaaaagggcctggattcagatctccactcagccatgtgttagctgtgcgaccctgggcaagctagcccgctgctcctcacactccacggtcgctgtgaggtgtaatgagatcgcacatataaattgattagtgcagggtctggaatgcagcaagcagatggccaatgaatgtttggcaacactgcacttcagaatcgggctctacctagacagacttcatatcaaattccagctctcccacttaccagctgtgtgaccttgaacaagtcacttagcctctctgagtttaattcctcctctataaaatgggcttcatatttttaaaatggcaaagattctaaagattacaaacacaacacctgcgtcgcttccctctgtgtacagagcagcgttgttgcagtttgcgcgctaaggctgtagactgggctgcagtgccttttaaatacaccagctcctggtttggagctaatgggacacatgccggggacggctgggagtcacagcggtgtagaggagaatatggcttcaagaaaatgacatttggaagtaattatgggagcaatggatcggaaccacagtcagctgccagctatccccagagacatcacaggagaaggaggcagaagctggaacatcatccgggagctggactagaacgtcccgggaaacttcagcctggcttctgctttgtcccgaaaacccagggctccagctccagggctctgtcttagaatgaggcagtttatctgttcagggcttctcttagtttttaatcccaataggacacatgttgtattaaaaagccatgcgagacggaagaaggaaattgaatgaaatttgagggcaggtaggagcagagacaataaataattcagcagtgaaggaagcagaaaaaagattgcactcatttcgcccttcaacaattatactaaacacctgctctgggccacagaagggccagatcccattcctgtgctcaggaagcccacaggccggcagggagaggctggttggaatgtgtgctttgcactgtaacggaggcatcgagcatggtaagggactggcggtggctgctgcctgcggacgtcgagcaggggcctttgaagaggcaggacctgtctggagtcttacctgggccttggccctggcaatggggaatggagcaggcagcaggggacagatgctgccagaaaccgagatggtgccggaggactgggctgagtctgggtcaaatgacaccgccccaggctctctgccctctggggtgaggcaggaggctgcctctgtgtgtgattcagagaccctagaatcccagtggccatcaccccacagcacatgccaacctttctgtgataactttctcttgtggaactgtgaaagtgtaagaccagctcctgtatagtgcatggccatcctttgctttggggacagtaagtcagtcaacacatacttataaatggggtcctgggccgtggcactgatctggtcctcccaccttgcctcacactgcccttcccactcaccacttccctcctctgcatcttagccgcaagggactttcagaccaagcagacctggaatcaaatcccaccgctgggcctcaatgccagtggagacaggaacagctgatccctggagccctcaggaggaagaggacgggatgcctggcttggctgctggtctggggcaggtgcccagttacagcagttggaaaaatcctcagtgttggaaggaaatttggaagtgagcatctacctgcctgccgtgcagtttgtgacttttaagatggttgacagaacattcccaaaggaccacagcggtgaccactgttctcgtttccctttggtggctcactcactcagtgctggacacagtggtcctgacaagacagtgctgtggcttccatgaacctaggacagggatagactcaaggactaagaacaaaccaggaagaagcatcaccacaggctccttgccagtcacctcatctcaccctcctggccctggcggatgggtctccatatttacaggggccagatgaaaaaaccagaggagccaggaaaaggagcttccccttcccaagggcgcaaggtgaggtgccagtcatgagatgcaagccctgagctttctgattccactgcatgtggtcccaaggttcggcgccgcatcacacagttagtgagcacactctcctcccctggccccgagtgagccagctggatggcagatcagaaagagaagtcccgggtgcccccaacatggctagctccttccaggaccaggggctaggccccagctaaggctggtgcacacagcagggcagggggcgaaggagtgggatcccacccagggatcccacccaccccaaacctgctttcggacatctttccaatgcataatgtgcagatgaggccctttgataaggaccaaatccctttccgttgcttggcaacctggctcacaagtcatagcagggaagtaatttacaggaattcaaagtgtcgctggaggttctgctgagctgaattgctgcaaagaggaacctcaatggtccaaatcacacctctggcggggaggaggggctgaaggaaaagcttccacttccgtcacttgagagtacagagccctgagctcagactcagcgatcgttttccattaacggatttactggttccatgttgagctcctgctgtgtggcaggccctgtgctgggagccagggacacagtgacaaacgagacagatgccaaccccggatgcacagagctcaaagagacagaggagtaaacagggctacacatgtgacaagataggctgtgcacaggggtctgagcaggacccttggggcaggaggaggcagtggagggatgggagggtagggacgcagtggtgaccagctagccagatagagaacagagggtgtcccagcacagggccacacaagcaaaggcagaggtggggagagaagagcctgccacactctcagatcaccatgtggttgggccagggccccagctgaggctgaggacacatggagcccagatccggcagggccttgaatgccaagtcagaaagcatctgaaatttagtctacagatgatgtgggttattgacagccaggacagggaatgacatttgtgtttcaggaaaaccactgtcttcactgttagggggtagattcagggagaaacaggaggtggaggggaagaaactgtgagtaaaggagtctctggggtacaggtgaagtttctgtgaaactggagaagaaaactgttgaggcaagagttgacaaaacttgaagtaggatggagaggaagggacaagttcccctggcatggtgacggcccggtggtgggaaccagggaagaggaggggctttgcaggtgtctgacttgcccaacaggtggcgccatttaccaagatgggaagggccggggagaagggagggttccattctagggaaatctcaggtcctcgctattaggattctttcggttgccagtgactgaaacccagctgaaatggacttgggaacatactggttcatgacatctggtggaggtgaggtcagggtgcactggagccctggcagcccactctgatgccagagcccatggggacagcggtgtatgttggacacagtagtccttcaagggcggggatcggaggaacagaagaaaggaacagcagatgccccactgaggctgagcagaacatttaggatccttggccccatctcattgtgccctttgctgtggctcatctcacacttgcagggagaagccaatggatctctgtgaatggcgaggctttgtatgcataaatgtgggccattttgtccccaagaatccctgggggtgaggaagccacagaaaattgaggtcctattccctgctcactcctggtatgtagtggaagctggagagcctttgtccaggcactgacagcaggaggtttcatgcagagctgctcagggcatttcccagatctgtcccacccctgggaactggctcagtggccttgccccaccagaagactgggaactgcacccaagacaggttcagcccccccaggagaggacctgctggtgtgcgtgtccacacacagcacagaagcaaggaagatctggcaaacaaccttcaacaaaaaagaggccatttgcactggccacctgtgctgcttctttcctgagcagacttggttctgagccagggggtctccctctttccctcctccagctcaggaaaggactcaggcacatgtccacccaacctgcaggagagtgtggcacagcagtgaaaggcctgggcttcgcaggccaacttgggtttgatttttggctctgtgtcacaggcctcatgagatgtgctcacctcttagctccctcatttcagaatggggatgagaatctgccatgcccctgcccaccagccacctgcccaccctcccttatcatgtgccccgacctcccatgggtgctgctcatctgagtccctctgtcctcactatgacggctggtctgggaacccctctggccctactctgcttcaagaccatttagcctctgctcctgcttccttattttcttgctatttcccagctgcaatttctttgcaagacagggaaaggattggatatactcagcccatcttaatttttttactgtgggaaaatacacataacataaaatgtactattttaaccattttaaaggatgcaattcagtggcattaattacattcacaacggcatgcagccatcaccactatctggttccagaactttctcatcacctcagatggaagccccgtattcactaagaagccactccccattcccacctcccccaactcctggcaaccaccaatctgctttctgtttctgtggatttgcctattctggatatttcatttaaaggcatcgtgcaatatgtggccttttgtgcctggcttctttctctcagcaccatgttttagggtctatctacgttgtagcatgggtcagtacttcaaccctgttcttttttttttttttttttttttgagatggagtatccctctgttgctcaggctgaagtgcagtggcacgacctcagctccctgtaacctctgccccctgggttcaagtcattctcctgcctcagcctcccatgtagctgggattacaggcacgtaccaccacacctggctaagttttgtatttttagtagcgacggggttttgccatgttggccaggctggttttgaactcctgacctcaggtgatctgcccacctcggcctctcaaagtggtgggattacaggcgtgagccaccacgcctggccacttcatccctttttatggctgagtaacattccattgtgtggatataccacacggttttgtttattcatcagttgatgaacctttggattgtctcacattttgaccattgtgaatcatgctgctataaatattcatgtacaagtttttatttgaacacttgtctctaattctttggggtatatacccaggagtggaatcgttggctcatatggtaactctgtgtttaacttattgagaaactgcccaacagttttccataacagctgcaccattgtacgatccctcaagcaaggtgcaagggtatcagtttccccacatcctcatcaatgttcttgtttttatggtccttccagtgggtgtgaggctctttttactttttaatcaccaggcagagatctctcaaccaactataaaatgattaaatgactgatagcctttgtgatcaatcagactggctggagaacaggaagatgagaggagcctggagtccctgacccagaaggtggccatctcaaatgttttttccatcttccagggctgtggactgggcagtttgggacccgggaggggcaggccgtgagacctgtctagtgcacatgtgcgacctcatccgatcctcatagtaacacttactaaaattcttaaccattaccccaccagtctatgtccacacggccacgctcacagccgtccctgcagtgtcccaggcccactctcacttgttctttgcagaacctcatgatgaatgcagcatccactgtttccttcttctgctgctctggttcccctccaccgaagcactactttgtccaagaaactgctccttcccaccaggcagcgccctaggctggggccaaactagccagtatcaaccacaggcttctgtcccctggcctgagatcagattcttagctgcacagctgcccctgagagttcctttccccaggatgtgttctcaagcgggcaatgcctcaagcctcctgttgaggctagaggaaggaccacctcctgttcaccagcatgcacagactagacaggacggctccgtctgtcgcgcttctgttggtctctcatgcccaagggtgtggctctgggatcagcctgccctggttcggatctacttaattgtcactgtcactttcagctcgttatttagcctccagtgcttccattttctcaggggtgtagtgggatgatgaaaacaattcccgtttcgtagagtagtgatgaagagtaaatgagctaatcccagtaaaaagctttaactcctgagccacagtaagtgctcagtttatctaagcatcattatcaaacataaacaatcatttacagagtgatgaccaccgtatgctccaaacccagggctgggggcctttcctacttctacagtgacccttagaggtgagcagtctagcccccactttagggataatgtgacgaggtgctgagaggtcatgatctcccagcagtgagtgacagagcctgaggtgaaccccaaatctgtctgactctaaagttcatgctcattccaatcatggcaaagaaaatgcagtgtcttctcacgaagggttcatccctgcctcctcagtggctgtttcaaggagggccctttggtttgcccagatagactattcacactgaaagtgacaatggagaaactggccaggacactccaaggtcacagagaggtttgtggaggtgagatgagggtctcagccggcggggagggattccggagggcagcgatccctaaggtggagccttccagccacaggatgtgtgacgagaaagttttccctcttctcccctcacagcccgcaacaaaatctacatggcttgccaatattcttggagaatgaatttggggggctgtatttgtttcccatgactgctacaacaaattaccacaaactgagtgggtttaaaacaatagacatttattctctcactgccctgaaggctagaaggtccagatcaaggagtgaggacagaagaaggtaggcactagaacttgacccagaagcctgtgacacacacacaccccacatccttctccagccccccattatctgtctcctaggaacaaggacaccactacattcattccagaaaagaccccttttgtctgccagccatcctcagagccgaaaagcaaacctttgctgctgagagctgctgatagaagagcaggaagcacagttaaaggggaacaggctcccaactctggggcagcagatcttttgggcttcatgtcatagtattgtaaagacaattgccaaagtcagacaagatcagttgtgtgatcttggcaattcactttgtttctctgagcctcagtttactcacccataaaatggggagaaccacgtctacctgactgactcgtgatgaagatgaaattaacacaaagacaaggctgggcgcagtggctcacgccagtaatcccagcactttgggaggccgaggcatgtggatcatctgaggtcaggagtttgagaccagcctggccaacatggtaaaaccccgtctctactaaaaatacaaaaattggccaggtgtggtgatgggcaccagtaatcccagcgactcgggaggctgaggtaggagaatcgcttgaacccgggaggcagaggttgcagtgagctgagatgcactccagcctgggcgacagggtgaaactgtctcaaaaaaaaaaaaaaattaatgcaaagacaaaattagtgtgggaaaaccctttgctcagagaaatgatggccacaaagtcatattactccccccttactctgtaaaatctcctttgctagaggaagagttaaaagtccaagtgggaagcacagtcccgggcggaggcagggaaggctatcctggctctgagtcgggctctgtctacctggattttgtgcctccacgttccctttcatcactctccaacagggagatgtctgtctcccctcagtgtgatagtaatataatggggcctcctggtgctcctcagaatcacgtgctctgggcaggaaaaaggtgcaattctcctgcagaatgtacacagcaaagactggaaacgagaaaactgtcttccccagggtggcttcctaacaaatataatgagaaggcgcttcctctcttcctttcagtcacatggggaggtcaacagagagcaatgactgtcctgaggctatttatttattttttgcctgataataattataataatcacttgcatttattgagttgtctgtgtcaggcaccgggctaggcacttcactgcatgagttatcgcaagcaatctttccaaagggattaggaagcaggagttattttacagatgaggaaactcatgcatagagaggttgagtgtgacgctcatgttagcctaacatgaggatccaagagcttatccatttactcagactttttgattattttttgtgcaatttcacagacttttggtgatgcataaaatttttttagagtactagtttgggcctggcatggcagctcactcctgtaatctcagcactttgggaggctaaagcagcagaatcacttgaggccaggagttcaagaccagcctgggcaacatagcgagacctcactaaaaataaaacaaaaaataaaaataatacaaaaaattagccaagcatggtggcacactcctgtagtcccaactacttgggagactgaggcaggaagatgtcttaagcccagaaattcgaggttgcagtgagctataatcacaccactgcactccagcctggatgacagaacaagatcctgtctctaaaaacaaacaaacaaataaacaaatactactttgctcattcatttaagtcagtaaattgtgacaaatggaaaaatgcaagaaaaaaaaggaagctggacataaagctagaatggaaaatgcatgagctcttgctggggtgggtcctaatttggcttttagcttcctagcagcccttgcaaagaagaaaacaagatctgttaggtaaatctctatagcagtggttcccaagacatggtctcctgaccagcagtatcagcactacctgggaacctgttagattgtccctctccaccctcgaatctgggagtcaggcccaggcatctggtttaacgagccccctaggtgatgatgatacatgctgaggagtacgaaccacttatgttagaataaatacacaccagcttctaacattgatatcgcagagaaatttctgcatgacacagtgagctattatattgaccaaatccccattataaacaccatcatgtacttaataggcctttttcttaacttcctacttagcatacactcatgaaaccttctcaaggcacagcttaatgaaattagttccagaggcaccaagctatgtcacccagacacacagcatgatgggctggtttcatgctcatgcacacttctgagtagtgaaagcctggagaatatcccagcattgctgttagaagccaggactctggagccaggctgacccaaatttgaatcttaggtgcacctttcattaactgagtgaccttggccaattcccttaattccctccctctgcctcagtttcttcatgtataagaggaaaatgactattttatgtattccatggagttgctgtaaaaattcaatgggctaacagaccgtatgcttagtatggtgcttagtatgctaatgagtccttataaatgttcccacgattatgaactgctagagtgtgtttcctgtaggtaaacctccaagccatcaaacctatgtccatgtctcctgccaccatctgtcctggatgattattgttcagatgcatattccaaacttactgagtacctagtatgtgcggggttctttcacttatatcatttgcctttaaacagctctgcactgtagttattattacccattttctgcatcaggaaactgagttccccccaaaatgaactgacttttcaaaagtcacacaggtattaagtgccaaagccaggatttgattccaggccttctggcttgacagtggcactcaaattcatcaagtgtttcttgaggatcttgcagatattttctcatattgcaattctagtctctgattttttagccccagctgggcaggaaggaagcaggtgcatcagtttttagaactagagcaggacagatgcttagaatgtatctggttcaagcccctagtttatagctgtgagagtccaggctacaagagggacttggcttgccctggacccaaagagctaagcagaacaaatactcacatttggtgctgctcatttctctcccctgggccccacagcatcttcgaaaggtgaggtcaattcccatgaaaagtaccacactacgaagtgcagccaaggtccagaggggtatggcagagagcttagggttaattgattagagcaggaaaaggtcagaagatgtggaatcatccacatagcccttgcaaggaggtatcacatacatccactcagggtcgaagacacagacagcatgtgtctctctagccttccctctctcctggagtccatagccttggctgcctgccaggaacccggcacacccacctcccaacacctcccaagcccactccaccttcctcaaagggtaacctcttcctgacctaatcgttttcagaggaaagagcaggaactttggagtcaggcctggtttcctaatcatcatattggtcaaagcaagtcacacagccaagcccacaggcagtggggctgggaaggacagagagagaagggagaatcgctactgaatgacagtctaccacacctattgtgcaaagtgctggaagggaggatttgttcattcattctgttaatatatattaactgaacacgagccaggcactggcctaggtgctgaatatgcagcagtgaatgaaatagacagaagtacttttcctcctggagttcatgttcaagtgaataatggccccacacctcgattaatccacaagcacttaactgtctaccctgtcaggtttccatatgtgccagacacatcatgtccacaagagattctctgcaaccagcgagctcatggcccacggggaaaccagacagacagacacccaatgacaacattgaaggcttgcacgcacgaggggccagaaaacaccccacatggagtgggtcccactctaggccactctcccatcccttcccttttccaaatttcctccctagccacatgccttggtttccagggccagccagctgtgcaaaatgcctagcaagctctcagcaggcccctgctgggcacagcacagagaaattaagtgcaattagcgtaactaagccatcaccagtaagaggcacttgctctcctggcggctccctttcggagactaatggggatgactagagaggaggatccagagcctatggctgaaacctcatcaacagcttgggagagtgacagccagccagtcttctgcccgcaggctgaagaggcagtgcttcccagggtgagccagaggtcaggaatcagaaggcctccccagagctcgctcccattttcctgagtctaggaagatggagtaaattggtttaatggagtggagtcccgttgtcatggtggcaggaggagaacagacggatcgccctgctccagcctgacaatgtgaggctgggcttttagcaaatgtggccggctgtaattcagagaactcaatttgacccatgctgtatcttctttcagataatggccgtgtgtcctgcccttcccccaagtggggcaggctagaaacctctagtggactcctcaccccctcccaagacccagtcaatctatagggcccgctggttccttcccccaggtctctcctctctccctggattgtggcaatagcctcctgaaggttcctctgcgccccagggctaagtcctggtcccatccgctcttcacatacacacacccagcatagcacatttttctagaactcacacctgaacgtgcctctcctctgttgaagacatccccagaagctgatccctttgttcccaatgcccttccaccctgtctccacctggcatatgcctgtgtttccctgaaattccagcttaaatctctctccatgtttggccttctctgcctcttgctggattcctcatctcgcctcccaccggttttgcatggatccctgccactacctgtgtgtgtccatcgctccatccattgagcctgtgaggggaaagcctatttaattcattgtcacatcccttccctggagacagagtaaaatagctaataattagacaaaacattaattgagtgcttattttatgtcaagtgtgatttgaggactttatatgcactaatttatttagcttcccaaaactccattaataggtactattaatgccccctacttgaaagattaagcaacagaggcatgaaaataataaagtgatatgtccaaaactacacagctaataagtgagagagccaagatttgaacctgaaggagatgggagggagagaaatagttggggagaccacagggaaaggaggaagaagagaagggaagaaaaggaggcggggagggccgggagctggaaatgtacctttgtattttaagtcattgagatttgggggttgttactgtcacagatcctagcctgttcttactaataaaataaataactaaatttataaagaagtgtcagaaaaaaaggtcatattagaccacgaaggatgacaaagagcttcttaaaaagggaactcaaggcccaaacatgggtattgttgtgtcatgtgaatccttcacaggggccacttggtgtctgtgtggctggctctttgtggccctggagagggaacaagcatgaatgcatcagtggcttccagcctgaacagaataagttcaacaagagatggccccagctccggtgtctactggggaggtgatgaagtgaagtgttcaattcctgcatagccaccaacaagtccctggaaacacaattgttgaggatgtgtccctcggggaggcatggttcatctggctgtgtcacaaagcagatgggaacagctggcgaggaaggactgcctgtcctgggaattgccctaatcatcttcctaaatattgccgcagccaggaggaaagcctgattccctgcagatggggccattgacaggatgctactggtccgggttgggagaaaaggaatgctgtaaacacagtcagcccattcggcaggcagtggaagctgtctgaggcttcagggccccctcctcactaggggctataattcatgcagtttcttatctgccagatggccaggaggacacatgcattccagtggtgccatcttctaagtgttggcagcttgccagtgatctcaacttcattttcatcattgccttttgagactttttgttcttaatcaccccaaccaaccatgaaattttaataccagaaatatattctctgtttacatactttatgcaaaatctgttttttaaacgtaaaaaggggattttttcacacgtgcattcccacaagaaccaattctctcccccgttgagaatgcctgttgtacactaaaccttcagataaccattttctgcaatcagccctatcagatttggagggagagaagcaactcaccaggaaacaaatgctctttgcattgttttgtctcttcccagaagcctcccatccaccttcagctggagttgagctttctaacatcactgcattcctgcacatccacattaccatctttatgtatttgattcctccttgagggcaaggcctgtttctctgttgtttacaccccctctcagtgcgtgctgtaaggtaggagcttcacagatggttaaagcaaaacagaacatgggccgggtgcagtgactcactcctgttgtctcagcactttgggaggccaaggcgggtgaatcacctgaggtcaggagttcaaggccaacctggccaaatggcgaaaccccatctttactaaaaatacaaaaaatagctgggcgtggtggtaggcgcctgtaatcccagctactcgggaggctgaggcaggagaatcacttgaacccgggaggtggagtttgcagtgcgccaagatcgcgccactgcactccagcctgggcgacagagtgggattccatctcaaaaatcaaaaaacaaaaaaaggaaaaaacagaacatgaaagccactttcccacagcctgggcacgtagctactgtggtgaatcacctttcctggcagagcacactcaggaaccgtcagctccaaaagcaccaaacagtttcattaagaccgtggctccttcgcagaagcacacggaacgcagactgacaagcctgtgataacattttaatggcctgagttcagttcccaataaaatacttaagtttctgcaatcatggagctggcattttcattaatactcctgattaattgtctgtcctaggaaaaggctcatcaccgtcacaatcccgatcttgctagttccttgcagggagaatcccagcagcctgggcttttccaccaggttaaagctggcaaagggcaaggaagactccctggcacctggtaccctccacttgccatggtaacagaggattacaggctctaagcccagctgctgtccttgcattcagacctcaccactcatacactgggacctggaactacttaaattgcctcagtttctttatgtgtcaaatggcgtttgacacataaagcactaatactaatagtacttacataataaggttgttgtaaggattaattgagttggtacaagtaatgtcctggcacgcatctggcacatagtgagtgcttcctataataaacagtagctgggtttgttgttgttttactattatttttcctccagaaaggcgagagttgcatcagccttggaagaggcaggactgagatgtttgggaacaagaccactttcacagggggcagccttttgagaaatgtcatgtctacttgatagggctttaaatatggagtagtgggaatctgcacatttggattcaaatcctggcttttccaatggctgatgatggaacccttataggctcaaatcactcacttctctgagcctccccaaaaattgagaataacagtttttattccatagggtagttttgagaattggtaagatgatcataaatgtagaagggcctggtactcataactgttttcttcatttatttatttagtcaacaatgttttctgagcacctaccctgggccaggcacactgaggtgggccttgggattcatcagggatcaaagggaaaaggcatcccatctccgtggagcttcacatcatcgtagttaaggtggataatgactgtctcgacagataggacagtggccaggacacaggccttcagtctggagcatgcttctcattttgaaataatttcttgttcagagtcaggttggaaggaaggccttgcaggggctgggtaaggatggcggcatctctgcgttcacgtctgtgtgctcaccatgagagcccacctctctctggcccaagtttccttctgtaatgtgaaagaggtggggttccatgctctcctcttcagcatcctccttagatactcaatctggcactcatcagtttcggaccctccatgctgccccaaaggaagccacactgcaccttcatccagtttcttaaacctgcatgttctctcttgcctctagaccttcgcccaggctattccatctgcctggaacatgcttccatacacctgccttcacttggctaactcctacttctgccttgtgccactgcttggattgaatgtcctctggaattcagccttcctggatgtccctgagctgggctagggtcccctctgcccacctctgctctttgattttccctgttcatcaccccagttatgacactgagttgtaactgggatttctaatctgtcgcctccaccaagcagcacactctttctggccagggtccatgtcttatttgtcttggtatctctagggcccagaatctggtacctagtgaatgtgtaacaaatattttctctgagctaaaataggaacacagggtccctgcaatgaagaccccaggtctggaggggaagacaaggtagcattacaagataacaggccttccctgcaaagcgtcagcactcagactggggcattgtggacaagaagggtggagaggagagaaggcatgaaggcatcccagatagggacacagcagaaacaaagacaaaaaggccggataagcaagatctctttgagccggcaggttaagatgggtagtggaaagctggaccactgtcaggttttgacccctccagacaatgcaccgtgatcttctggcttccatatgtccctggctgctgctgcctgctgcccactgagggacctcaccctccagactctaagtgatcttaagccaccagccttacaaattacagcagacagagggggtccaggcccttctagagatagtgttcacagcactttcccaaagctggttctgctcaattccctaaaagatctcctgcaatggggcctccagggtcctaaaagcaccatctgctcttaaagagtctcactgctcattagcatatcaaaggctctgaaatgtcctgcaggaaaaaactctgggctaacttttgtagccctgttccccaaactaaattgaatgaaggattctttttttatgacccacctacagttctgcagagatcctccagggaatgcagatctaacccattctctgtgcagtgaatggcagagaaaattaaagtgattgcatctattgcacacttacttttccttcgaggtaggtgagagagtaaataagatgcaggagagaattacaaccggagatataaaacagttgtcttacagggaatagtctgtttgcccagggaggaggttttcagaatacaaagtaccatttcttctccacgacatccccaggggagaaaggaaagtgaaagaagccctccaaccgaccactggagatgggagcatttctgctggtttcatttacataagtgtccttggcaatttgtcccaatttgtctcattataaatgatgtaaacatccgggcgtaatcacagacaaaatgggatggtttaaatgctgcctgattaaaaaccctgggttggctgcaatgacttgcaggcatgctaacggcttccctgcaagggactttggtttcaaagttctgagagctcaggagggtccctaggtctagttgcaaagtcatgtcccccatgactctgcaactctccacatagagcctagcaagaatgcatcatcttctctatatctcttataaggagggaaggaagaaagggagggaaggagggagggggagagggagggagaaaggaaagaagaaaagaaaggaaagaaggaaggaaggaagggagggagggaggaaaggaggaaggaagggagggagggagggaggaaaggagggaggagggagggagggagggagggagggagctaactgacattttcccctttgccatctgattggcatgaagggcaatgtaactgaggagtctggggaccaaagtgaatcctagtaatgtcactcacttaatatgtgtgattttttagaccaatcacatcatttggccaagcctcagtttcctagtctgtcaaatgggaatgatgatttgacatctggtgtgtctctcactactgttgagacattatataatgagagcatagccctttataaagacagggtttctgtcctctttcttacttcattctttccttctcttctttccttctaatagaaggtatagagaagacagcacattcctactgagctctatatggagagctgcagtcatgggggacactgtctagatctggggaccctcccaagctctcagagctttggaaggaaggtccctgcagggaaactgtgtgtgtttcttcaacagtgtatcctcagtgcctagcacatggtaagtgttccataaacagctgttgaagagacggatggataactgaatgaatggatgcttccatgggcaatgacacactaatctgaaaagccctgtatcaatgaaagaatcacttaatagtttaacttttccctcatccttcagaacacagatggcatgccatcttcccttcaaatctcttcccagtgccccacacagaagaggcacacttggacactggtgtctgatggacccaagttcacagcctgtctctggtcatcaggtatcatgaccttgggcaagaagcttaactctctgagcctcagtttccccttctgtcccccagggaaaatgagtcctgcccctcctaagggaggtatgagatgtaagaccccgaaggacacaaaggtttgccaggagccttcaggtaggaggcaggtaaggaggtctgctagattggaatgagtttctggaaggccccaaggagctcaaaatcagacctggggtgaaggtgtcttgaccaaaatgagacccatcaaagaagcctggatgaaggtgcccacagcatccatcagtgccaaaaacagaaacactttagcccaggatacaaggaacattttaaagcaacagagataagagatagttagaactcaggcctcctggctcttgctgttcttggcccataattagttgttatgggaccttaataaacttcttgccttcttggtacctttgccaaacaatctgatgaggagaatattgagtcatggtgccagggaaaattagcatattctgcaaattcctggcactgttaacactggattctgtccacctttagaaatcctcagatcactatgtcagcatcccccaatcacagctctccaacttcaaggagggttgaggggtctgaagaaggagagagaggcaacagagccagaaacccttcagaagatgccaagagcaaggtttggacccatagtccaccacttactaacttcaagagtgttatgagctacaaacttctcagtctccgttgactcatctcaaaaatggaagtaaaattatttaccatgcaatatgttgtcaaaatgcattgggtttagttcatagcaggtgctcaaagaatatcagttccacttcccttgtccctagagagccttgtagtggatgttgatgtgtcttccaacacatgcaccaacctttccctgtcctgtagcagttgagatggaatcatcccactcccagctccaggaataggctctgatgggcttgaacccagcagcttaattccattggttctctaggccttcatcattagtacaggaaaggcacttgacctaaattagttcgataagatttaagctcagaaatctggtttgttggatggagaaagagatgctttctttctctctggaaggagtttattgcaaaagtaagggctggggctgctacagccattgtgctaccatgagggaactagccatgataacaaaacttgcctggggaggggctacgcatcacagaaaatgatgccaaagtcctgctcaaactgtgcctgatgcctgcctgatctatggacttcttagttccatgtaatggattctctctatttttaaagccgtatcaggttgaatttttggagaaataaaacaaaaagcatcttgactaatttaaaaaatcttctttgggtattcaaccctcctaaactcacccccaaatccactgggagcatgtcaagatttttgtgagccgatttaggagatgcaaattcatttgccttaattggatctccaggaaatgacttctgccccctcttaaatcatttaaagctcaaagaggcatgagggccctccccaaggatgcaggtatcctcttgactgacagcctgtatgctctgcttccaggatccttccatctcctccctttactgagggagtctgctatgtgttagaggtgtccatcactggtcacactgggaagctgtggcagggaagctggagaaaaagcaagataggccccagaaagaacaccaactccagactcagggagactcaggccagaatcctagctcaacttcttccaagctcccaaagtcacactcttttctctgagcctcgattttcccatctgcaaaatggggatactaagggtcacctagctgggctgccctggagattccaagacattaggcatagaaacagtctggcctagaccctgtaggccagtaggcatttgatcaatggcagctgtggttgagatttttatcatcattatggctgcccttcctgctttccagggctagtgtagatctaagattataggggctgcaacgttcctcagtggagcagatgcagcaaggtagtaagagagggcattctcacttgtccccacagagtgtggtgtgggggagatctgtgagcaccccagcagccatgagggtcagcacttgaatctctgcaggtcagtcatactcctctttattatttttatttttatttatgtattgatttattgctctgtcacccaggctggagtgcactggcaccatcatagctcactgcagccttaaactcctgggctcaagtgactcccacttcagcctcccaagtagctagagccacaggcacatgccaccacgcctagctaatttttcaattttttgtagagacagggtctcactgtgttgcccaggctggtttcaaattcctaggcttgagtgatcctcccgccttggactcccaaagtgctgggattacaactgtgagccactgcacctggccttattcccttctttttatcagttttcaaagccatcagtatgcagagcactaggcccagaaatgagaggagaagagagatggaacgacgaagaccaaaacctctgtcctcaagctgctcataagccagtatagagacgtgtggagtctgctgtcctgagttccagtcccagttccccttgcaagcagccgtgtgacttgcagcaagtcattgaatccctttgagcctcactttccttgtctagaaaacaacaaaactggaaataatactgcttcccttccagtttgtcaaggatgaaggtgctttgcacggtccctggagcaaaatgtgttctcaatcaagattccgtctgtggtgggtggagccgcgtccttcccaaattcatattcactcagaaccttcaaatgtgacctttttcagaaatagcatctttgcaagtttaattcagttatgggtctcaagatgaaatcatcttggatttggggtctatccgaaatccagtgactgatgtccttataaaaagaagggatacaggccggggccagtagctcacgcctgtaatcccagcactttgggaggctgaggcaggcagatcacttgaggttaggagttcaagaccagcctggccaacatggtgaaaccccgtctctactaaaaatacaaaaattagctgggtgtggtggtgagcacccataatcccagctactcgggaggctgaggcaagagaattgcttgaacccaggaggcagaggttgcagtgagccgagatcgcgccactgcactccagcctaggtgacaagcgtgagactctgtctcaaaaaaaaaaaaaaaaagagtggatacagagaggcagtgaagaaggctgtgtgcaaagacaggcagaggttagtgggatgcagcgcgaggctaaggagtgtctggggccaccagaagccagggaagcctaggaagggttttcctagagcctttggagggagcacagccctgctgacaccctgacttcagactcccagcctccagagctgggaagggataagtagctgttgctttaaaccagtggtccccaacccttttggcaccagaaaccggttttggttcagtggaagacaatttttccacggacagggtgtgtggggtgggagatggtttcaggatgaaactgttccgcctctgatcatcaggcattagcattagttagattctcataaggagtgagcaacctagatccttcgcatgcgcagttcgcaatagggttcatgctcctatgagaacctaatgcggcggctgatctgacaggagcggagctcaggcggtaatgcttgctcgccagctcacctgctgtgcagccggggtcctaacaggccacagacccatccgtggcccaggggattggcgacccctgtctttttttttttcttttttttgagatggagtttcgctcttgttgcccaggctggagtgcaatggcacgatctcgactcttcaacctccgcctcctgggttcaagccattctcctccctcagcctcccaagtagctgggattacaggcacccgccaccatacctggctaatttttgtatttttagtagagatggggtttctccatgttggtcaggctggtcttgaactcccgacctcaagtgatccgcccacctcagcctcccaaagtgctgggattacaggcgtgagccaccacgacctgcccggggacccctgtcttaaaccaccccagcctgtgatactttgttatggtgaccctaagaggcaaatacaccctcctttccccaacctctcccctcagacgaaaccgatgcgaaaagtgcttcatgaagtttcaggtaaagaagtctgggacgaaaagggatagtgaggatggcgggaggggctgaactccaaatgggcttatcaaggctctgcaaaatggcgtgacggcgctgcccccttctggtggcctgaagactaacgcacatgatgtcaagtgcggggcccaagtactcaggaaaaggttctcatttggacactgggaggtcttacattgggggccctgagcctccagcccttccaaatctattctcagcaggagctcagccacacctgtgtcccagaactgaggccaggcccagccttcactccacgcccagccagccccaaggaaccgactccctgaggctctatgctccctgcctccagtggccccgtgtctgggaaatagtggccctggcctgatgccctgacctgggcaatccatcccctggtcctctcagctcccgggcccaggttttctgggctactttaaccagggcaaactcattcctcgagtacaaaataaaagattcgaacagcataatcaaataggtcatacccataaatcaacacatttgagcacctattttgttgttctttcactaatccaaaccatatttattgagcatctactatgtgccattctccagtagccattctaggtgcaggggatacagcagagaccttgaaaaaaggaacagtctctgatcttgctgagcttagagtcaagtggaggtgaggaggaaggaaatgaattaacaactaagtgaagcagaaggtaaccaattgattgactgacgaaggggtacaaacaacaaacaccttcctttctccaaactctatctttaactgtattctctcgttttccttcctctccattttacaatcattttacaacatctctggctattctcctatatttctgatcacttcggttctcatcacaataataatttcagttttcaagcattggaaagtcccatccaattaaaatgtcaatctcacacgcagtttaaacgtttcgcctgcccgtgagctcagacctgtcttggtgcctcagttcttgtgtggaggggaggagaggagaggggaggggaggagaggaaaggagaccggggaggtggggggggagaggggaggggaggagaggggaggggagtgggggagaaggggagaaaagcgcagctggcttcctcactctcctttccttcctcaccatccttaccctggcccagggcaggaggaggattggcagagtagaggcagggtcttctgtcttagctgggcctgttggtgactttctgttggccaacatgggctgactggaatgttctccagcatggcacatggtcatccagatgcaggctcttccctggggcactatagcagagagggctctcttccagtctattgcagatggatgccctcgtgagctgagttttgatgaacatcccatgtccccagccaccccattcagagcctctttctactctggtcctctggtcccagcagcagccctctgggtactgaggggagggcatctcacccaagccccttaaacctgctcaccttcttcagagcccacgtggccgcaggaaagtcacaaacccttgtgctcccacagggcacacgtgtgcacacgtgtgcagctaccttctctctagttggtacctgaggctgcctcctggattttccagtctctgtgttcccagacaaccccaagccccaagaatacaagagctctgtcaccaagcatcgggcctgtggctgcactacacgtctgcagctcaggacccctggctgcggcgtaagctaccagcatccccttctcatgggcaccctcatctccggctccccatcgctgggctgtgacctgcgggggcgcccctctatggaagggaaggagaaaaattcacagtgctatctactcctctgaatgcactcccaccaatttccttggaaatttctagctttcactgacatatctgggatggggcggtggtcacaaaatcaatcccactttccctcggctagtcttacaagcacccaacagctctattcagaatacagggctgcccagctacttcccattcattatccccaggttgcaagctttagtcaaaacccagaggcagcagggtgtctggttccacctgctgttaggatgatttcaggagtgcaaagtgttagaaacgcggtaaaacatgatgcttagagattaagtgggatggggactgggcagatgatgctgctttggacccagcgagtgaggtgagactgcgacaagacagagccactgagcagtgacctgggggatgggcattgcaggcaaggcagaaccccaagtgggaacaacctcactgggcttagcaaaactaaagaggcccaaagtatactgagcgatgaggtgagtggcgtgggataaggttggagaggaggctggaaccagaccctgcagggccttgcaggtgatgggaaggagtttggaaggtgctggaaggtttgaagcagaggagggatatgatcatgcctgtagctgctatgtagaacaactgtatgcatgccaggcctgtgccacgcatgctctaatcattactggctttaacccttgcactaacgttgtcatgcaggtaggagcatctgcacccagcaaatggaaactgaagctcaggaatattcagtcacttgtccaaggctccccagctgttaggtgctaaggctggattcaatccaggacttgcagactccagtatcttggcttttctaacgagagtgtgctagctttctaatgggggtggggaaggcagtctgcccccctcccatggcaccgtgagcaggtgtcactgctccagccagtacgcctggacaccgactaggaaggagtatgtgctactaggagggatggtctgggctgactctttgaagttgacaaggagttgcataatcccagctaataattatgctggaccaggggcagagacattactccaagggtgaccaggtgtggagaagaggctgctgactccggggccccaggacctggcccccaggtctcattgcccgagtgctgccccagaaggagtagaagctggagctgtccgggccacagccgaggctgggtgaatgctgcagtgaggctgccgcacaagttgcgtgttgtgacatttgtcttctggaggggattgggatgggctacttcagcatttaaaaacccctactaggtctgagaaatcccctcagcttatgagcctgggtgggcagcaggccttctcaagaagcccagaaggccagatgctcacttcccaggctctcttgcggctgagctgagagcaggcacctgaggcctggcaagtgtgacagctggtgacacagacagacagggacagggagatgggactgtgcctgcagcggtagccctggccggtgttcagtggggccagcatccgtgtctttcctgggggccagtgggggccgtggctctgacgatgcatccctcccccacgttttttctcttcttgtcttggactttgcagggagcactctgcttttgggaacaggagctgggtctctggccattctccgcagcccctcaccattcactcagtggctctcaaaaaatagaacctggggcaaagctgttcttggccccaaacaacatgaggaaaaataaataaataatgtacctggtaactgagagagttccctctgcatcttgggctctttcaatgagatgtcctctgcctgcagcaagccccaagggcttccctcaccaggaccagcaccctggtttgcctgaccccacacctgccaatgccggggcaagaatgtcccaggctgccctggttcccagagctgatgcttcccacagtgcccagctgtgctggcatggagctaaggacagggccagtcccaagaaaacaacaaggctccagggccaccggccactgctcaggaccctggctgaccccacagatgcggagtgcctgagatggctcatgggtgacccccaggcatctggcaaaggtcacaatggctgtttggcttgaagacagcccttgcaagatctgttttgagccaacctgtggcatttagccctccctgggtgacaaataaaaaggctgaggcttgtaggagccaaggtgggagtccccatctacccccaccctctcagcccaccagggcccagactggggaactgctcctgcttcgagggacagggctgaagaggagaggggcttggggctccccttgatcccaaagctccagggaccccaaagaaacgtatcagcagcatgagaatatcgggtgacctctctctctagtaaatgtcaaaacttttaaccaaaatgccttcatcccccagcgccaggcctgagctaatctcataggtgtcaggactgggagcctggacccctcttccttctgctcctgctttgcagagaagtgagtggggaattcccgcctctgggaattcagagacgaagtgacagagacagcattggaagataagaatgcagccaaagaggtcttcagggtagcgtgtggcctgggcgctgagactattgggcctagcaacttctcaagcagtctattaaccacagccggtagccagcttttccccgcccttctcccaggcacacacagccacctccatcaccaaaggtcaggcgaaccacctcccatggctacccccagcctgacttgctttatagaaatcatggcatctcatcctcacaacagcccacactcacagtgaatcttggccattatgacaactggggacactgaggctcggagtggtggaaattctcagaatcacataacaataagtgttaaagtcagaatttcaacttcatctctctaactccaaagggcgtgtgtgtgtgtgtgcgtttctggccataatcatattgtgccctacaagccccagtgaggaatctgctaggaacactggtttggggaaaaaatgtaataaaatatgtgatccagaaggcggccttggtacctgtcataaaccgcagcatggggtactcactatgcctggggtctgggctctgaaggcatgattgaatgatctcactgcaggcctggttgtcctgcgaagacacccgtcaatacatgaatattgacacacaacgctgcagtgcacgcgcttctggcaggggagctgctgcactcgagggcagctcaaggttaatttgcagggttcatgtttggagtttctgagcaagtgttgcagctttggcccccagccccctgaggggagctctggccgtgcatgagggtcagacagaaaatctcctttcctccatccaggcctgcagtctgcagcactgaggtcagcgctggccacaagcccaccctgtgcctcgtcagccccactgagcctctccatctatcatgccacaggctgaccctgaaatgcaaaatcattctgtcctcccgccctccactcccacctcgcacatctatggatttgctgttcagaaaacatctgttccctccttcgcccctgacatacgcatcgatctcatgctagcccagctgcctaagctcaccactctgggagacagactctcagtcctcatcagacagagatgtagggggctgtaagggacggggtgcaggtagggcctgaggattccgacaaggtgagccatgggcaggggcattgttcatgcagggacctcctggccaaggtcctacgtcaaggttagaaggaaagagtaaatgatcggataggctaagacagcaactcagcaggccaagggactcctcccccaggacctgctccacccttagaggggtcccggacagccaagccctgatggagttggtcagcaaccaaccagccctggggccaaggcctgcagaagcagagaggaggggtctcaggcaggccagaggtgctagctgggatgcctgggtcccccaccccaccccagcacactgtcctttctccaggtgctcagttagattgagctgggtcccatcttgggcctttgctggtccctccctagaaagtctgccccctccccctgcagggtggcatcagcattcaggcctggccctgacgccctcctctctgggccaccttcacctccacaaccccggcaccagcacccatccccaccacatccccagcacgcagcatctagtaagggcaccaaatgcatgcccagacatatgagtgaaatgaattaaccctgaacctgaaaaagggcaaccaccacacaagattctctagaaacaatgtgaattgtgcagaaggaaattaaccctactccatccagcccatcctaaggcagggacttggacctgttcctcttgatggggctggggctgaggcgggcaaggcaggcaagtgctgaacagttggcaacattgcccatcccgtctccctgcaccaggctgggcctggggtgagggggtgggggccggggtagctgggctcctccagcaaagagcaggactgagtccctggtgactattaggtaaaaggtccctgacaattttgaggggccagatgccaactcgagggatacagagaagatctaggcacagtctttccccaccatgtcagacaaaaaggttagatacaggacctgatatgttataaaactcaatcaatatttacttagtgaataaatggacggatggatggatggatgcattaggcagccaagtgggcagcaccgatgacttaatgtactgagtgctccgactccagcaacatgcattcattgttcctactgtgtgccagtgaacaagagcaatgaactcaatgacttctgcccagggtgggccagggaaccagggaagactctccaaaaaggcagcatttgggctgggacgtacagatgagtagggggtcgagtgtgtcgttatgtcgctggagcccagaggcgtccatcaggacttgggggagggcagatgaaagggccttactgcctaacttggagccactgtatgtttcaaaacaaaggagagagaggatcctgggaaagagaaagggtactctaggcagaggatgtgaatgggcacagcacaggtgagaacatcaagaccaggggtcagggaatctactggtaaacaattgtaccccaagggagcaatcacagcctctccatccacagggaaatgcctggtggggaggaatgggaggaaagaaacagattgcatgactgtgtcttgaaggtctaattccagagtacagcatcacccctatcttccaggtccagaaactgaggctcagagggagactttctgatgagtgcagcgtgcagataagagcatctccaaagctacctccttccccagtcacaccagggcataagcaactgataacagctgtcagcacgggacagtggagggaacactaggttaggaataagggtacgaggcttgagtacagattgtcaatgactcagtgtgtgaacttggtcaggtgactccaaccagatgacttccttctctgagcttctgttccctcctctatgaatggggacaatcactcagcttcacaaaacaatggctgcgaaattgcctggtacaagagagagaacttccagtgtgtaggggctgttgtcctaactgcccagccccctagataggtagttatgtcatctgtgaaatgggtgttagaattcctacctcccaggacagctgtgggcagaaaaccaaagaatgtgtgtgagagcccaagcaccatgcctggcacatagtaggtgctcaggaaaggctgagggtgcagctgctgtccacacacatggtaccactgccccaggaaggggcttcaggaaccaagagcaattctgagcactggtgactggactctgccattctccatttcaaacgctttttgaaagcagctccagacccaagcaggagagcaggaggcaaaagaaacgcaggggctttcccgaatggaattttagaaacacacagaattgtctcctgcacagaagggaagctgtcttccacagcacagagccaccaggccccagactgctggcttatgtatttgtcattgctcatcatgaatggatgccaggaaagtctctttgtgatgggggcacaacccctcaaatctcctcccctccagatgccatccactggagctgagactcccaggtcccctagggcttctctcccaggggcctctgggctccccaaggccacgtgctgcccccactagagacctgggccagtcctgaccaggggaaagagtagcgccgacaacagccccagatggtatgtgcactggcacatactggcagctgccttcatgacagcaagccataggtccaaatcccgccccttcacagggacattcccaactggtcaggggtggacctccccttcccggctgtctttggtgtccaggacgatttgccacagacagggggagctaaaggggcccacgcttgaggccgctcagctctgagtcctcgccggccacagaggaccttcgtgcctgtcctctgtcctcctgcccagtccccaggccaggctcagctggagttggggagcagaaaaacacgcatctgaatcaaggctctcggagcctttgcttctgcctccaagaggcgagggaaaatgaatacccaggcgagcgagcaagagagaccctcagaaaaccccagatgcccctggaatcaagccctgtcccaccaacgccacgtggattgacaggctattagtcttcctgtaattaggattctcgcctcaaatcttgtatctttttcccccagaagattctcctccagccttcaccactgccccctggcgcttccttgcaaggcttttgaagaatcctttgcagagaagcagcctcctttggcaggggctgcagagcactctgcctccctaggccagggcgaaccaacagaggcgggagatgaggaggagcagcgcggctctgctgcgtggccctgggcaagcaccacaacctctctgggccgtttgcacattcttaccgccagggatgtgggcggtaaatgaaagagaccagcacaaaccagtgtcagctcccttcctcgattcctaaaatgtgatgcccaaagatgggccagcctcctgctgtgccttctctggggggacatttaataagtggaagagccctggctctgagtcaggctagaatcccagttctgcacttaaccagctgtgtgacctcaggcaagcaacctggcctctctgaacctgagtttcttcatctgtaagtgggaacgctaatgctgtgctgagggttccatgggacaaccatgtaaaagcacccagcacgcacccagcaggcagcaggtcctgcacagcgttccctcgcgtgggggtgggttggggcttgagcacgggttgaacctggaagaggccatttccctcccttctccccgaggaataattgtgaattcctgggtctcagaggaaacatccgctttggtggtcagaaaggacatcctcctttgagcagggggagagcagagggaagggggttgcgagggtcacgccttccccaggcattctcggggtctctccagcaaggatggaggcggccaggggcttgggcggtgtggggcgccacctggcgtccagaagaggtaagacaggcggagcgggaccctccgaagtgggaggaggacgctggtcaggggaggaggggaccgcgagagcgagagcggacattctaccaaacacatggacaacacagaagatgaggaaaatgagcagggcagctagtcataggagcaaattttaaaaattaagtgactgaggtagtcagggggcctcactgagaagtggcttggagtaagacctgaagttggggactggatatgcagatgtctgggaggagagcttttcaggaagaagaatcagccagtgcagaggcctatggcagacccaagcaggaggcaaaagaaacgcagaggctttccaggatggaaaatgaagaatcagccagtgcagaggaatgtgcctggatgtgttccaggaatgtttcagaatgagctaaaaggccagggacagagaactaagaggagaggagaggtcagagagatggcggtgggcggaaggagggggcggggcggaggagggggcgagggggcgggggggcggagggggggacggaggggggggcggggggcggggcggaggggggatggggcggggcggggtgtggctgtgcgtctggataagggttgtggcttttatgctgcacgagaaggagagccattggagagcttggggcagaaacaagagctgatgacattttaatccctctggctgctgtgctggggtagactgtcagggccaagggcagagtgtgaaaagcgcccaagaggcttctacaagaatctagtgggagatgctgcggctctggccaggttagtggcagtgccagtggtgagagggatgtggttctgcgggtgttgtgaaaatggagccagcgggatttgttgacagaccaaagttgaggtgagacagagactccggaatgactgcagggttattggtctgagcagggttattggtctgagcagataaccagatggagtcaccactaacttagatggagaaggctggtagagtgaggaaatatcgggaacttatgttcggacttgttaagtttgagatggctgggagatatctaagtggagagggcaaggaataaaatgcttcctaaactccagcatccattcagtcccctggagagcttgttaaaccggatggatgggtgccacgcccacccctgcacccctgagttgcaataggcccaaaatgattcaataggcccaacatggggcccaaggttctacatttccaacagcttcccaagtgatgccaatgctgccagactgagaaccacacttcgagtagcaccaaagtaggcaactggatgtttgaggctggcattcaaaagagagatcctggcaagagatagaattttggagtcattggcacggaaatccacaaaacgacatgagctctcccagggagtgtgtgtgtgtaaagagggaagaaaagagcattgagtcccgagccccaggctcttcaatggtaagaggttggcagattaggaaggaccagcaaagactgggatgggaaaccactgaagcaagaggaaggccaggcagatgtgtcctgaaagccaaaaagagaaaggtcatcattaatatgatacattttgcaatttgtttatatgtaagaggagattaatagctcatagcattcccaggcattgctgttaggaattgcagctccaggctggcaacccttaaatcacaaactagattgtcaagaggactgcctggaattccagctctgtaagtaatatgctgtgtggcctcagccaggtcacttcacctctctgggcttctcttgcttccatatataaatgtaataagaaaatcttttatttattatttatttatttatttttgagacagagactcgctttgtcacccaggctggagggcagtggtgcgatctccactcaccgcaatctccgccttccgggctaaggcaattcttgtgcctcaacctcctgactagctgaaattacaggcacccaccaccacacccagctaatttttgtatttttagtagagacggggtttcatcttgttggccaggcttgtctcaaacacctgacctcaagtgatctgcctgcctcggcctcccaaagtgttgagattacaggagtgagccatcacgcccggccaagaagaccttttaaagtagatgttctaagagtctctttcagttctgaatctctttgttatcttacatgttaccccctcagagatgccttccctcactcccctgtccaaggtagctctccacccaagtcagcagtcatcacagaaccatcacaacctgaagccctgtgcatgttgctgtttatttcctgtttacatcacaacctgaagccctgtgcatgtagctgtatactaaccctagagttagtatagcttagttaaactttcatttattgctaaaggtttatcactgctgtctctatcagcctccctgcactgtaagggacaagggggcaggtccagtttctgtcttgtttcaggttttgtctccagccaagataagtatctttgcaaggctctgtttttattctgaaaggaaattaggagctattggagggtatggagtggaaggggacagtcttctgccttggatgtataaaagggatgctgggccacgctgatgggctagaccatggcaggcagagaaaacaggcaggaggccaggcaggggctgccagtgcccagacacaggccgggaggtgcaggtggcagtggcaggcagtggccaggccctgggtatattttgaaggtcaagccaacaggacttgccagtgggctgggtatgggcatgagacaggcaagttctcccagatgtgactccgatgtgacattttggagactccctcaacacccacctggggaagacagaccagttgggaggaaatatctggagtctcattttattaattctgagagtttgttgtattagacagtgaagcggaaatgtcaggaagtcagctggaaataggagtctggagttggggggaaagcctagccagagacaggaattgtggcgtcattggcgtagagacagcgtttaaagctgtgacgctagatgggttcaccaggggaatgagagtcgaaagagaagagcagagcagagctgagccctgaggggggcagaaaggcacacagggacagtggaggcaggaggcagaaggcagagggtggcgggccaacagctctgaaggtcagtgctctatcacaggggggtggccgaggaggggcccgaggctggaaccaggaggcactatcccaggcctgccttctcatgccagcagcagtgatctatcctcaaggagaatattgattgagcacctactgcatgcagagacctcatcaatggctcaatcaatatgacacggccacgcttcctgatccgagccctctgagcaggtattttccatcctggacttatccctgtttctcaggagagggatggacccaagagacaaatagttcccccaagatcgcacagcaagccagtgtaaaacaagcatagaaaccagcttttagggggctcaaggtgggggtcagaaaatgaggtgagagcaagcatttactgagcacctcctgtaaatatctcctacatacgaagtgctctacccacattactgaccacccaataaaggcaggtcctgtaattcccaatttgcagatggataagcagaggcttaggggtgtgaaacaacctcctcaaggtcatggcttctaagtggtggagccaggcctgcaaaccaggctgtctgaatccaaaatccacctccaagtccacagtgggttggccccacccccaacccatccccatcaccaacaggacggtggtcagagtccactgaatgaaagcatgcgtgcattcaaaatagacagccaatcagcagccttccatcagaaatgtcatctttatgacaacagcatcgattccaggcgtaccctgcatatgtgaaccaagggggatggtggattgtcctttccaagcacttcccagccccttagagtcccacaggcccagaaccacggcccttgacaccctctacccacccctgctcccccttctcctcagaccccgagtgtctggccaggctttctcactgggaagtggccactccatccaaatgaccaccgcacccctcctcaccagcttccctgcttctgccctggcccccactctttgagtccattcttcaaccagcagacaaaggggtgctgtacacgcctctgcacagaacccctccaatgccttctgtctcaactcagagcaaagggcagcagctagcacactccaaacactcccacccacacctcagctcctccctctgtccctctgctctattccctcagatctgacggctccatcccataaacgtggcacacacacacctgcctcaaggcctttgctcaggctgttcccactgcctggagcactcttcctgcagacacccacgaggctcattttcctttagtgaggctttcctggccgcctcttccagataacaactctcctctccttccctgccctcctgctcctcctgttcgcgctacataacagactctgtggggccttggtttatgtatttccttctctcccctactgaaatacatgtgagcgatgctggggcaggccgactagaagaagcagactatctgcttcttctccacccttagaatggtgctgggcccagaagaggcatgcagtcgatatttgctgaataaatgaatgtcagataaagtggtgtggggactccaggggaaagatttgtcattctccaccctcccagttcagcttaaagcagagaagtgagaggtgcccaaaaaggggtgtgtctggggggtggggggtggggatgttccaagatctccaaggcctggattttaagcaaggtttgagatgccagcaagagggcctggcattgccagattgatagtctgcatttcagagaaggacaaccccacctctgaccttagcccaagcctcaacagcctgctcaaggagatccacccttagtaggaggaggcagccaggccaggttccagtccctgccaccgcttgccaggtgtgtcttgggcagcagttgcctttgctcggtggtcttcagctttgccccctgccaggcacgtgctggcctcctgcctgcatcgtagctcatggagtcctctcagtcacctctgtatgccctgcagcatccccagttctcagtgagaagagtgtgctctgaaagttaagtaacttacccaaggtcacacaaggtctgagtctcaaatgcatacaatttgaccccatagtctaaggtcttgaccgcaatggaataagaaattattttaccattctgagtggcagtctctgaagactacagcaataattgatgcctctcagggggataggtgtgtcacttacaggtgatagtgaggttgtcctcagcctccctgctcttcgttagacctccctcctcctctctacccgggccaagcgtccaaggcaaccctgtgtgttgcattgctcttgggggcagccagtcccccacataaagtggtgtcttccttcagctcctaacaagtcatgtggccattgcccacactacaacgacagaggaagcctcaggggaaccctcctcctctcccgaatctccgggcttcctgcatccctgggaggcaatgtccattaattccagctatgaccagcagagggcagcagcagcctggggaagacccagaggcccaggcctaggggagaggccggtgtctccaccctaggagccccaattcctccgcagcaggagcagacacacaaagaggagggcgagcaagggtcctccggggcggaacacctctgccgcacctgcagcagccttgctctatttcttcacaagcttccccatgacactgacccaaggctgtctggccactacagctgctgatgatgattagcaataataataataataaacgaaatgccttctgcttagatcatctttaatttcccctccagaatgacattcgactctgcttagagttacaggcagcccagcaattactgagcgcaaataccgtgttcacccgcctcacctcatccacgcccccacaacacccagccctgagactggctccacgatcacctccactttataaaataagatatcaaactctgaacagaacggacgtctcaaaaaatgggcatattacatttaaaccctcaatctgttgggtatttgagtgaaatggacatacctccagggagtcggtggcgagggccggctctgaggacttcctgggttgggatcctggctctgcaggactgcgtgaccttggtgagttacttcatccctccaaacgcgctgttctccttcatagaatggagatgaccacagggccagattcataaggttgttccttgtaatacaggtgaatatccatacccagcaactgctggaccacctgtggtttcaaggataatttccctcccacgtccccgtggcccttggaaccttcctctcctcctgtctccccctgcccccatcactttgtaattgaaaagtcatgattgctctcccaggtgtagcactgctcacaggtcagattgcctgctctgacgtagtgactcagttggatgcggttcagctgtgtatgatcaactccctccccctgacaaaaacattattttgcatcacagagaagttgatttctttcacacataaaagaaggcaaaaagtggtgcctaaagggctggtacagcagcttcaagaaatcaggaagaacctgggctccttctgccttcttgttctgccaatatcaccccatggctgccacttcatggcccaagtggaaccatggagcaccacccttcagacccataggtgacaacagcctgctctgtgagagtggcagtggcttccagagagacttaggaagtagaatcaacaggacttggtgacagatttgccacagagctggggaacagggaggtccaacggtgactcccaaggagctgatgtgagaaccagagctgctgtgaatattgttcccaactcctgagacagggacagtggtcccgtggctaggaagtggtaggcagtagagagtcacaatgcacattagtatatcaacattgtgagtagggcacgcagggaagaaacctgttcaacccagccccgtgctagaaagacatcagcagggcctgcaaaagccctgattaaatctcacaagtttgcacctggagccgccatcttgaattgcaggtgaatatcagcctttggtttgggctgtgtgccccagatgatggtggtcccaaattacataggccaatatccagagctgggttaaaatgaagcatttcgaggaaaaaaatgcaatgaaatttgtttaaccggtacttcaggcttttgagcacagaacagcgtccatccctccaaacacacactgaggatatacacttagccaggagggaacataaggaggggtggacaagccatgtttactaaaatctctcagtgtgtgccaggcatgttcatgtatattcaggaagaagtgtcagtatttaagatcctcggcccttgcccgagtccccaacacgccttcttgtctggagaactgtaaatcttggaaacatcttgcaaggggggacacctcacagaaggcaggcttggcatgggataaacagaatcgactcctctgcttccttctgatgcacagtgaatgggcaggtggaagcatcgttgcttaaagaggaaccaaaactccaccccagagctgctaattccttttggcttgcagttatgcagagggctaaaaaatccaacgaatcacaaatcccctggttgctaagtagaaagaatatgttttggctgctgctgttcccttccccaaggaaaagattcaagcagaggcggtccccacctctcaacacagaaagcaacatctctgattgcctctagacacaccttcatgctcgtggcactttgggaccctctgcccgctggcttatgggcatggcttccccatcactctgggtccttgggaagagcctctttcccagaccccacctctgtgcctcatcacatttctcccaggctattgacttgttcaaggttaaggtatgaagagagtcatgcagcagccctacctggctctgctctgctgggggaagccttttcagagcctgcctcttcctcagcatgaggggctgctcgggcccagtcccagaggccatgctggtcccaggggaaggtggccgtcatccccatctgtgttttctcttgcaggtaagtcatgctccagcagtcgggagggttgtgtgatgacacacttggcagtttgggagcaaaagccgccacagtaagacacaattgattcattgcctctcaaccctctgctggggtggactttcatgcgtggacttctgtccccaaagaggcttctctgggtctggaaagggccctagccttggttgggggaggcaaaggggtggcggcttccaggtaccatctggccaggaaccggctccattgtctgtgcatgtagcttgcactgggctgcctgctccaagggaggcatctccccacgatctacgacattggcttcaaagagctgctcctggcagcttcgaatggctgagacctactggcatgggatggaggagtgcagggagcttcccgggacctcgctagtcctgcctggatgctcagaaggccctcgtcctcggtggcatgcagcctcggccatttccaaactcacggcatctcacccagccatgtcacccacccccggctctgtcgcccttcccatcacctttctcccacccatcacctcacatcaaggtttcagccagcgggaaccaggtttagactccaattacctgtgcgtgtgggaggttggattgtgacatctttggagggccgggcttctgaagcgacatttgatttctggtactgaaatgtcaaagggtcctgaggcacccgctagggcagcacgcggagcatccacctgcgtgcgcatcctgggctctctctgggccacttggtgctggggacatgccgggagctggtggtcagccctcctcctgcctcctcagtgctgcatcttcaccttctgcagctgcctaccagaagcagggggacctggaaggcaaaggagagggagttggcatgtagtgagcaccgactgtgcacacagtgccagcaaggagcttcacactcatctccagcgtcacagctgcccagtggctgtggaagccgatggactgggccctctcccagtacacaatcattagagggtctcagttcactgagtaactgtgggagcagcacggtgcctccatcagcccccagttctgctttcgaaacatcgtcaccatcgccaaagcaaagcctcagacctgcaggccagcgctcccatgccccatagccgggagtaaaggacagatgcggggaatctggaaggagattcacttcaagcaccatcccactctatttgttaaacttgtgctcctgtgaaaactgcttgtgtctgcatcaaacccagctagggagggctgagggctaagggtaaacctgggagagttgaattccagtgctgtgattaaaaccaatattccacataatgcaatgtaacttgctcacatcgtcccatgtaatctttaaagccacagcccttttgcaattgggattattatctccattttacactggaggaaactgaggctctaagaggtgaaatgattcacccagttaggaagtgatgagtccagatgtggtagactgaataatggccctcacaatggaacctgtgagtgttcccttagatgacaaagggcctttgcagatgtgattaaattcaggatcctgagattgggagacattatcctagattatccaggtgggttctaaatgtcatcagaagtgtcttcataagaggaagacagagattttgctacagaagagggggaaacatgatgatgagtcagaggctggagtgacacctggaaggggccatgagccaaggcgtccaggtggctggaagccagaaaaaggccaggaaatgggttttctctgtgagcttccccaggaaaccagcctggccaacaccttgactttagcccagtgcaactgactccacatttctggctccagaactgtaagagaatacatttgtgttttgttaagctagcaaatttgcagtaatttatgacagcgctatgagaaaccaaaacaccaggattatgccccaaggatcctgatgccctccctcctctctgctctgcagtgtgctggagctcacagggctctgctgctgggagttagtatctagtccaacactttacccactcaccccccaagctaagggactcctgaaatcagggaccagatgcataataggtgcccaggaagtgagactcgccttccccagattaagaataaagaagacaaactatccacggctgctgtgagcctctcatcagacctcagcttctagggcagggtccctgcctgtctccagtatgtggcctctgtgtcttcttcgccctccatccccacagtgggacgagaagtcatcaggaaggcaggggatctgcaggcagccatcagggctctaattgcagctggctgggggaccatgggtcagggctgccaccccctggctctgtgccttcacctgtgtaacgaatggggcactcacagcccctctcaagtggtcctggggatgaagtgagaaggtgacatatacaagtgagttatacacgttcctgttctgtcactcaccagtgctcactgggtgggtcactgaactcccctcagcgtttccttctccatctgtaaaccaccagtgcaaacctttcccagatagtgctgacccgaagcaggaaccagtgcccctctgccctcagtaagtctgccagcagaggaagcccatagagggtcttgggaaatgaagccaacagagtcaagagggtcagatgatgagggacttcaagtgccaccttcatcccattctttctgcaaatattcaccacacacctacgtgacctcaggctctgtgtcaggtcctggggatgtaatggtgtccatgaagaaacaaggtccctgccctcatagagtggcctgacatatgcccgaggcagtcagcagccgagtgcgggagactcttgagcagagattgagtgtgttgatatctgtaggcatcagcctggctttgctgagtgagctatatcagagtggaggaggccagaggcaaagtccagactccactggatcctggattgaggggagaaggggctgggcggaggagcagcctgagcacctgcatctcactccaactgggtgctgatttgtccccatggccccagcacccaggcaggtcaccaagtaagctcaagacaaaaatgatgagtgactcaacagtgtctggggacaagggagggagagaagaactcaaaatgactgaggtttccagctaccagaaaaatggaaggaccttgaaacaaatgggccatcagcaggggacactggctggaagcccagagtccagtcagctctgtaaggcccccagaataggcatttgacttcaagtcacaggcatttcagcaaaagcctctttgctacagtgattatggtgaagcagatgcccacagctgagatgggcaactctcaggcctccagtggggacagagaatccctgggccccaacatagcttggcctgaagatctgagtcaggcatccaacctcttctgctcagctctttcaggaagatgtgtatactggcctctcttgccgcaagggtccaccaccttccttatgtgtgacctaaggcttctagtgctggctcagtggctaatttgagcataagcacccttgttggtaaaatgaaggataggtgtagatcagcatttcccaaagtgtgtgcttctcagaaaattaggtccctggttgtctgtagaggttacttaacaaagagactctgtagttatgttagaaataaatcttatgattaccaggattagtctctttaaagcttgtctaggtgggtcacaaatccgcctcagtcaggctttaaatggggaacagggtttaaattggatttaaacatttaaaaaccatgctaacaagaaccaaaagaaagtgagagtagctacattgatttcagacagagcagacttaaggaacattgttagggataaggatggatattacataataacaaaggtgtcaatactccaagaaaacataacaatccttaatgtgtgtgcacctaacaaccgagggtcaacatacagaagacaaaaaatgatataaatgcaaggaggaatacatcagtcaactgttacacttggaggccttaacacccctctaccagaaatggacagatccagcaggcagaaagtcagtcaaggcatagctgaactcaatgacactatcaattaactggatgtaattgacatctgtaggctactcatccaacaagagcagatatcgtatttttctcaaacccacatgggacgttcaccaagataggccacattctgagtcattaaacatacttaacaaaagcaaaataataaaaatcatacaatgtctgctctcaaagcacaatggaatcaaactaaaaatcaataacaaggagatagcaagaaaatcccaaaatacttggagattaaacaacactcctaaataacataggtcaaaaaagaaatcttgagaaattaaaaaaaaatactctgaatcaactacagatcacacaaacatcaaaacaataataaaggaatattatgaacacctctatgcccacaaatttgacaacttacatgaaatgaaccaattctttaaagtaaataatctgccaaaattcgcacaagaagaaatagataatcttaatagccctatgtctattacagaaattgaatcaataacatcctttcgaaacagaaagcaccaggctcagataggctgattggtgaattctaacaaatatttaaggaagaaaatgtatcaattctctacaatctcttctagaagataggaacaaaggaaatatttcctaactcattctatgaggccaatattaccctaataccaaaaccagacaaagacatcagaaaagaaaactacagactaatatctctcatgaacatagatgcaaaaattctcaacaaagtatttgcaaattgagtccaacaacgtataaaaagaattataagccatgaccaagtgagatttatcccagttatgcaaggctggtccaacatttgaaaatcagttaatgtaacccatcacatcaacaggctaaagaagaaaaatcatataatcatataaacagatgtggaaaaagcatttgacaaaatctaacccccagttgtgattaaaactctcaaaaaacaaggaatagaggggaattttctcaccttgataaagaacatctacaaaaatcctccagctaacatcatacttaatggtgagaaactagaagctttcctactaaggtacaaggcaaggatgtcccctctcactcctccttttcaacatcatattggaagtcctaggtaatgcaatgagacaacaaaaggaaataaaaggtatacacatagggaagggaaaaataaagctgtttttgtttccagatgacatgattatctgtatagaaaattgaaaagaatcaacaacaaaaacaaaaacctcatgtaactaataagctattatactgaggttgcaggataaggttaatatacaaaagtcgatcactttcctatataccagcaatgaacaagtagaatatgaaatttaaaacacactaccatttacattggtaaggtatatcccaaaatgaaatacttataatctaaataagtataaatcaaataacatatgtacaagatctatatgaagaaaactacaaaactctgatgaaagaaatcgaagaagagccaaataaatgaagagtattccatgtttgtggataggaaaccttggtattgtcaggttatcagttctttccaacttcatctatagattaaatgcaatcccagccaaaattattggttattagcaactattaacaaattattttatggatatcaacaaagtgattttaaagtttacagagagaggcaaagactcagaatagtcaatttaatactgaagaagaagaaaaaagttggaggattgacacaacctgattcaagactaactctaaagccatgataataaagacactgtggtatgggtgaaaaatagacaagtagatcaatggaacagaacagaaagcccagaaatagacccacatgaatagagttgactgatctttgacaaaggaacagaggcaatacagaggagcaaagacagttttttcaacaaacagtgctagaacaactggccatccacattaaaaaaaaaaaagagtccacacacaaaccttgcacccttcacaataattaactaaaaatgggtaatagatctaaatataagacacaaaactataaaactcctagaatataacatggaatcatatctagaagatcctgagtatggcagtgactttctagatataacaccaaaggcacaatctgtgaaagaaataattgagaagttggaattcattaaaatttaaacctctgccctgtaaaaggcaatgttaagagaatgagaaaataagccacagactgggaaaaaatatttgaaaaaatatatatctgataaaggactgttattcaaagcatacaaagaactcttaaaaatcaataattagaaaattaaaaatctgattcaaaaataagcagaagacccgaacagacatttcaccaaggaagatatacagatggcaagtaagcatgtgaaaaaatgctccacatatgtcattagggaattgctaattaaaacaatgatgagatgccactacagaactcatagaatggccaatatccaaaacacttaacaacacaaaatgtaggtgagaatgtggagaaacaggaactctcatcagtgcttcgtgggactgtgcaaaacagtacagctgctttggaagacagtttggcagtttcttacaaaactaaacagacccttaccataagattcatcagtcatgccctttggtattcacccaagtgaaccaaaaacttgtgttcacacaaaaaactgcatgtggatgtttacagcagctttattcataattgacaaaacttgtaggccaccaagatgtccttcagtgagcgaatggttaaataaatgatggtgcatcctggcagtagaatattactcaagactaaaaagaaatgagctatcaagccagtagaaggcatggaggaaccgtaagtgcacattactaagtgaaaaaagccaatcatgcttccaaccatgtaacattatggaaaaaagcaaaactatggggacagtaaaaagatggctggtttccagggttgtggggaggaagggatgattaggtggagcacaaaggatttttagggcattgaaacagttctgtatgctactacaatggtagacatatgtcgtaattcatttgtcaaaacacagagaatgtaccaggagtgaaccctaatgtaaactatggactctgggtgatagtgatgtgtcattgtagattcctcagttattacaaatgcatcatcctggtgtgggatgttgatggtgggggaagctgtgcatgtgcgggagtagggagtatatgggaactcttctacttcccacttaattttgcagtgagcctaaaactactctaaaaaataaagtttattaatcaacaaagaacacagtgagctgcaacttcataaccagtagattgacaagaattaagaaatttaataaagaattgattagaatatggagcaacaggaactcttacacattactgatggaaaagaaaattggtatacctactttgtaaatagtttggaaatgcctagaaaagttgaatatgaccccaaaatgacctaataatgccactattaagtattgaccctaaaaaattattgttgaacgcattttttaagagataaatgcaaaaacatttgttgcagtatcatttcaacagcaaaaactggaatcaatttaaacagctctcagtggttgaatgaataaactcattttatgcaaaatgaaaataaaaatagatatgggaacaagatttactatcaagtggttttctcaactttcctctcttcttaagaatattttattttgcctgccatcaaaacttttgttccagggcatccatggtccattgtttagtttctgcactgaacaaaggctcttgatgaaggagtgagtgggagctgaaatccagccatgctctgctccccaagccatgcatttgggtgcaggctctgtctctacccagagagaggaggcatcttttacttcagatattgatgtcatctattccccaaatccagtgcttacaagtctggatctgccctgtgggaagtatttttcaaattcatctactcagcctgagcatcattttctaactcacacaaaggcattttttagattagtaggagcactgacctgttcaccacccagcctatccatcctggtacaatcctgttgtaaccaagcaggtacccaggcctttttaatgcagcagagaaataggaagtgaggcaggagggaggcaaggtgatgtcttgtcttttctttgtcatgaaaaggtcaggaaagggacagatagagtgaaagaagattggaaaataagccagagaggctcggttgttcttcataacaaaaagaagttgggggtaagtaagagaaagagccaggaaagagagccagaaaagtcccaaaggaggggtgccctggggagccctcttgtgctttatagcatgagtggctcctgtgcagttgggagaaggaagaacatcagaggggagagaaaagggaattttaagaaatattgctaagcgttatagattagataccctttaatgtaaatattcaaattcctttttataaaaaaagatatattgaaatataattgaaatacaaaaaaattgtacatattaaacatatctgattttattagtctggacatatagccagacctatgaaatcaccacaatcaagatatgaatataactatcaccccccaaagtttcttcatgtcctttttaatcccaccttccatccctcccaccctgccatcccccacctcaggtaacactgatctgcttcccgtcagtagagagtagtttgcattttctacagttttatctaaatcagccacgcagtatgcattcttgtctggcttcttttattctgcattattctgggactcattcacgttgtgtaactgaatacttcattcctttttattgctaagtagtattgtagtatttctttgtatggatataccacagtaggcttattcattcatctatttatagacaattccaacttttgactattacaaataaagctactatgccattcacatacaaatctttacgtggaaatgctttcattcctcttgggcaaatacctaggggtggaattgctggatcacatgatggatgaaaccttaactttttaagaaattgcgaatttaggattttccaaagtagatgtagcattttatacccaccagctctccattaataaattggatttcatcaaaaatttaaacttctgctccaaaagacactcttaacaaagggaaaaagcaagccacaatatgagaggaaatatttgcaaagcatctgataaaacatgtggatctaaaatatgcaaggagaataacaactctattttccactaaggaatgaatgactgtacaaggaccacattctaattaggagcttctgaacccaaaggaatttcagataaggggaaatttaggcccaaagccaggagaaggggtgagtagggcttgatctctgcctctgaagggcagagggcgtggactattcttggctcttaggggacagctagagaaatgtgggtctcatggcgacaactctggactccattggaagaaccttctaacagtcagggctcccagagataaactagacaagtcaccaagagaggcagtgggtacccctcacaggaggggtgcaaatcaaagccaaggcttggagtggaccatattaaatccatttcttatcctgtgattcttagagtcctatctgtatcaggggaaggcaggtgggttctagaactttctaaatgtgtccctgtgggtttttccttctccagctacacacaaacttgggcctaataagaagtctatggcattaacccagcaggaatgcttaatgcttatatctgacctcaaaccaagactgtctccacagtgaacaaccccgtcctgtcccctgggcgtctccttagcaaatgccatcagtcaatggtgcagccatcttggagcccttgccatctataatcttctaccgccacccccccagctgattgttttctttgtatgtctccttcctggacattacttattctttacttttaaatatttgcttccgtaaaaaaacaaatgaatgcctcggacagatttataaagaacattcctggagaggcgggtggattaattattcagcatcctctccctttgtaactatttattgtctcatatgcatttatatggtacctatcactgcagatctcgctccatgctggagacataatttccagtgactgactacttgtctaagatatatatcgtattgcaatactattttatttctgactgtaagggcacgtgccactgttgggtaattgtgttcatgtttttaaatgtgaaaaataatcaaatataacttgaaagagattgtacagtaattcaaggggatattaaaccaccaggaagttactcggcaaataaataggcgtttgtggctgtcacgctgagcaatgaggagctggctggctgtgggggagggggagacagagagaggaagacaaagaggagagtgcagtgtgagtgcctggttgccaggttagttgtgttgggggaaaggagcttctaatggccaagaatagaagacctgaagttggctagtgcgtggctagtgcctgtaatcccagcactgtgggaggccaaggtggatgattcgcttgagcccaggagttcaagactagcctgggcaacatggaaaaaccccgtctctactaaaaatacaaaaagttagccaagtgtgatgacacatgcttatagtttcagctactcgggaggctgaggtgggaggatagcttgagcccaggaggcagaggttgcagtgagcccagattgaaccactgcactccagcctgggcaacagattgagaccctattaaaaaaaaaaaaaaaaaaggaaggaaggaaggaaggagaaaagaaaaaagaaaagaaaagaaaagaaaagaaaaatgacctgaagtcactggatttccttcgaggtagccagaaacagaggaaagggggcattgcccacttagggtaaaaagtagagcaccgaattgtggaaggctgcaggttttcatgtgtgcttgcccaagtgatgttccatgtcaggctctagggtccctgcagggacagagagggactaacatttacttacatgcctatagtatgtcaggcatatacttgtgcctttatatatatcagctctgtttttgtcattaaaacatccctgtagaaagataggcactgctgtcccattttacagatggggaaacccaagctctgagtggttcagcaaaccctgggtgcatacccccaccttgcccctgcaaaaccaacaaaaaaacgaaggccctgccttcctggagctgacatttaggttgattctgaaagtcagtaggcccagattttcactcttcatttttcttgtttggaatgagagagcacacagctgggtcgggggaaggagcgagggtctaggcctgcatccactcaccccaaaggaaaggagtaggggaccagtctgctggacatgcagacagcgattggagaaaagtcagcccagctatgaaccccattcctttcagtatgagccaagagggatggcatctgtcagagttgctggatttgggattttgcatcttgccaagtgtccatgaggaattggggaaactctccccctggctggactgaggcttcagcaagcattgttgctgcccagtggtgatcagctcagtgtccttggaaaagagcagaaagtggtatcacgaacatatcttctcctttgcttccttctcctcactcttcatcatcatcatcatcatcatcatcaaatatggatctgtgaggctacctctggggttgaaacttggttttgggcaaaatttgtgatgttctctctgcccaatccagcctcaggctacaaatgaatgtaaaaatctctaatttagtgccaagtaacagaaaacagctctacttatcttaagccaaaaagagggacttctcagaggcatactaatggaggatggcaagagggcctcacgtggaaccagggcctggagcggcacagcattcaggaagctcagtctccttctctctctctctctcatctctgcttgtttccctttacctgtagacatgctatcatttttccaatatccatggcagaatgtggccaccagtaactccaggtgtataacagaagcctggcctcccaggagagggtgacttgatgcccttagctccagccttccactcccaccctgggccaagcaactggtggccaggaggagctcatattgcaggaatattgaaattttcactaaaatcatttgaatcgaggaggacatttcctagaaaaaagggtgctagtctgacaagcccacagtggtccccttcatctggcaattcatcttctgcaaaggtcacaccatccttttcgctttccaacctctgcaccagtgcccaagtctgtcactccctcctctcattctgaaacatcctctgcactccattcaccagtgccaagccttgcccttcttcagggttcaactttgtcccaccttctctgagaaggctgccctggtccctgcaaccgctatgagctgccttttctgagctcttctgctgtggaggatccatgccattgacctaggcacccgttttccacatattgagcattgctgagcacctattctgtgccaggcactgtgcttcagggccatgggggatgctccaagcggtaaaatgcaaccaaagccccgaaggagctcacattctagtcatgtccacaaagaggtaataaatccataaattgtatgtactattctagtcacaataaaattgtgtcgtactgtaatgctgggtatccattttaaaacggggggcatcggctgaatctgggtcattacagtaggaaatgcatatatataatcatttactcatgaatattaatgtatttaatgagggtaaaagatattacttaaagcaaagtattcgttccagctactgttggatttgttcattactgtttcccatgcagatattacctgtgatttacctgcatatcaagcatctggaagtagctcaaatccacctgtgggtaaattaggttagccatttgttggcaaaaattacagtgttaactaatttccagggtatgcttgcagtcagtagtttcatacttaggtacatgacttgcattcacatcatctggttaatggtgtgaacagagattttctttatggtttttggaatacagtaagataatgttaagctaacgtaagtctgttaacagtacctggttctgaactgtatttataaggtgtatcataaaaccattactttggagtttgccaatcttaaattcagaacaattcaaaaatgagccagaatctagtttgcatcattaccacttataaaaataaggatctgtaagttggctggataaaatatattacaaaataatgacttaagtggctctggagccagcacaaaagataaaaattgggtatactcaaaattaccttcaaaatatcttaagtcattcttaaaatacatgtaaatatgccaactcaaaatacatccaacaaaactaatatttttcccaatttgttggaagaaatttctctttctttagttgtgcattagatgaggaagtcagagtgcattaatattcggggccctgttgtataaaaatgacagattttcaatgtatgctaatatgcaggtcacactcggcccagtgagatgcttgcctagaggaggcacgtggaagccaaggccaaggaaggcataattcactctggagaacttctttagctggcaaagctcagtttctccccggatcccattttgctctggttgaattcgcatgcaccaaaccaagaccaaagagtttatgatgtggttcccgccaccgttggccaatagcaatttctaggcccaccttcaccaaggcaggtcctagatgtgttgctaggcatttggagtttactgagatctgcaaagctgacttcttccccagtttcaggtggttcaggctgttcttgcctctccttggtgtgtcagagtagaggagaaatgactttcagtgctgggaccataaccctgtttccactccacttctgacttgcactgtgggctgagaattgacattctgcttggggaaattttgttcccccaaccgtagcaaagtttaattaccatgttcccgctgtggggggaaatcctattcaagaaaccagcctctctcaaatcaatcagtcatcttgctcattgaccaatggttcggccacccggcaagaaattagaaaaatctatgcataggagaaagctttccaacagccctggaaaggccttgggccccaaagggctagtatgaggttgaggtgggggagagcaagagaggacaaaacaggctgggtactgaccttcctcgtactccatggctcagaactctgacctcttgccaacctgccttccgcaagcagcgagagtagcacggctctgaggggcatggccagggaggatgtgacctctaagtgctccaagtcactgggaaccctgttctaataataggcaaagcttcagttgatggagtgcctatatgggcccagccctgtgaacagcttcctctcagttttcccagaatgaagctcagtgcacacactaagtgtgcaagaaacacacaagaattaattgcaattttaagtccttgtgacaatcccaggcctgcatctgcagggagttttatgaaggctgtttatagaattgcgggaggggttaagagaaagacaagagagtgtgaaatgccccagaactagtagcaggaagctactaccatccctgagcctgaaggacagaacccagagagacagacctgtgctgtaggtcagggccccccagtgtgagcctcagctgccgctgccagtccccaactcaacaggagagagctggacaataaagaccctgtgagcacccacaacttcccattggctgcatcctgttagaatctagaggtcatgggagcctgggagaggccacccatgaagatcagcttccaggggcagagagcagagtggacatggaggggcaaatggggaccgtccagcacagtcaccatctcatagacattttcctccacctcctacctcgagtagccagtagggttccagccggactgtggagcatcatcccaacaactgcatggctgcttcccactgtccctttaacagcgcacatgggagggagccacaggtcagcaaggcccttggctcccgctgtggccctcacccatgcccatccccacccgtccccatgctcagcacatcagcttcactctggctgaccatgtgcacagacatgactcagtaagtctgtcttttcttttcttttttctttctttctttttttttttttttttgagactgagcctcactctgttgcccaggctggagtgcagtggcatgatctcagctcactgcaacctccacctcccgggttcaagcaattctcctgcctcagcctcctgagtagctggaactacaggcatgagccaccatgcctggctaatttttgtatttttagtagagatggggtttcaccatgttggccacgctggtcttgaactcctgacctcaggtgatctgagcacctcgatctcccaaagtcctgggattacaggtgtgagtcaccatgcccagccaactcagtaagtcttttgaatgtgagcggaggcccccactcagcatttccaagacctgggaaatgagggtgaggagggggccaagagctctgatttcaagtcccagccctgccacccattccttagggcaggcacccaccaccgccttggctcaggcctcagtttccatctggaaggtgctggctgccttgatgggcctctatgggccctccagctctgtggctccatgtcaaatgcccctgaccacccttgagattaaccctttcccaaggatagacagcttcccccatcattctagatccctcacacttccccagctcctacggaaataacctatcccatcccctaagatctgcaactgttgagggtaagtttttggttaaaaagagtgagacagactttggcgctagtgcaaaacaagctgctgctgtaagagtgcatgtgtgtacctgcagactggtgcaatcagatgaccttcccaccaggctgcacagcactggatgtcctcacagtcactcagccactcagcaaactttgactgcacagcaacccatgccagacctgctgctggactccaggcatgttgagaaatgaatataatacccaggctatggcctcaaaaccttcaaaacccagggcaggacacagacagggacacagatgtgatacctgctgggatacagtcctcatgaggctctctaagaggtatctaagcagggacctagagggaggaggtattacctgagttgaacctaatggaaaggcattgcaggcagagggatcagtataagcaaatactcagaccaaaaacaatggcatgggggactccaccaaagaagtaaaagagaatagggtgctacatggtgtctcagtcccttttctgttgcttagaacactgaaactaggcaatttataaagaaaaggaatttatttcttatggttatggaggcttggaagtcccaggttgagggagcacatctggtgagcccttcttgctgggggcaggtactccctgcatagtcccaaagcagcataaggcatcatatggtgagggggctgagtgcactagctcaggtttctcctaaaaacccaccagtcccactccccaaataatccattaattcattcacccacaaatttattaacctcttaaaggtcctacctcgcaatactgccacattggagattgagtttcaacatgagtttttgaggggaaaagtattcaaactatagctcacagagatcgcttttcctagagatggcagatgaattttggaggtagagggagaggggcagatcacacagatctcatagtgtgtacaaacctgcccttcctgccggtggtgggcagctgaggaagggtctgtctcatgaaccattaaggctgcagagtctagcacagcatccaggccacagcaaaagcatgagacatacttggtgagtgagcaagagaatggaagaagaaatcaatggagccaaatgactccaccagatttgcatttgagacggtcactgcaagactgcaccagtcccaaattcccaagacagcaatgttttccacgatgggtctgaacatgtaaccattctcaggttcctgttgggggtttgggagcctagaaactgagacagcctcacagctgacagatcacgagcagccatctaagtcgacgtttccaaagtcatggggcctatggtttgtgagcttatttaggttgtccccgggcccagcatcaaaagcattgagacacgtactgagggactcttttcctagcctctcagtcctgactgctcaaggaccaagtggtacttcttgcctgcgttcctttaatgcttgcctaatatgagctagtcttctctgatcacttttttttttaatccaaagtaggtgggcattgtcccaagagcctttggaaagcagctgcctctcactaggacttcacagcatcattttgctttgctctctttgtggttaaaattaccttccattcgtggtgggtgtatgtcaggatccccacaagaaacagagggacacccaaattagggacatacttcagagggactaatgacaaaggcatgggtgggagtagaggggaatacaagggagacttcaagaatcttggcctttattataaatgcaatgtatgtccactatggaaaatttggggaaaaaagcaaactagaaagaagaaaaaccacattgcctgaattcctactgcatggagagaagcatcataaacaccttttggaggagtctcttcttcctttctccctttctccttctttgtatagagaggtctttcctgaggacttcccagaatcttgcagatccaaaatcttaagaatttgcagaggcagtgaggagttaacatgcacagctcagggaatattctgctttttatctggaaccaggctcggaacaagactccttgcttttctgtcctgtgttttcatcttctctcagaaccctaactttgagataagatctttgactattattaggcgggtgcaaaagtaattgtagtttttggcattatttttaatagaactgcttctgtgtcctcagatctccatcgttcatctcctgataagtccctgaaaatttcctggccccttggagctccttccaggagtagaatgatcacaagagctgccatgtattgcttattctggcctatttccttaggcacattagcccatctaaccgtttccatggcccacagaggtgggaggagcatgaagaaaaatgcaaggaaataagctcatctcaaggtatctctggctcccaaagaacataggacattaccaacttgaagttagcttctcaggaaactaagacccagctgcttttcaaatcctcaaaatattagtatgaattatagatatagttatagccttcagaacttctggcacagcccaaaactgttggctgtaaaaccatgtttcctaaattcaatcatgtttctcattgatttccattttgaaattggaagtctttgccctcaagatataataaaaaccataccaaagaaaatggaaaacttttcccccttaatatttaaaggagaatgatttttataaaaaaaaaaaaaaacattcatttgtctacttaaagtaaatcacagtgcagtgccagtctgggtttggagcataacactttttttgatttatggtttctgccaggagacacccagctaatgatatttgttcctatgtccttctctgactagctgggtggcagctaaagagctagggtgaggggagaccagaactccaggcctgtcccatgttcctgtctcacccatatgtggatttcaaccctgggcttagtgtctgcctctagcgacatgggaagagagggatgggtcctctccttcttcttgtcaaatggcccccagagtcccaccaaggtggagctccaggctcctgaccagcggggctccccaaccctcctgctgtgcccagtctatccctccttccacgcccagcagagctcagcagacttgcccttggccactcttgtgccttcactgctgtgtgtcctggacaggagccagcgtgggcttgctgatcacagagaaagctcacgtggcaaaagaaccagtgagattaacaagtcgaggtttgggatatatcttagagatggagccaatggggcctgcagaggatttccctggggactggaagggtgaggaaggagaatgctctcagatgacacctaggtggctgatgtgatagaatgggcattttctggaagatctgttcaggggcatttggtgagacagaaatcaagggtttggcttgggacctgatatgtttgatcaccctgtcagccacccaggtggagaggttgaggagatggctgatggcatgggtctggagctcaaaggagaggctgggtgaggcttgagttacacatttgagggcatccatgatgtgaagcacatgggggggcccacacaggggtctgtgtgttcccctgtggtgtgtgtggggacacgtgagtatgtgtttctgcgtgtacattgacatgcatgactcagaatgtcacatccatcacaatttcctgtctgaccttggctgaggtatgtctgagttttaatggcctgtaaaatgagggggtgatattagatggcatctgagacccttgccaactccacaattctaggagttggggaatcccaaagatgctgccatccctggtttgtttgggtgaacaggaacagagaagtcttaagaccacaagcagtgaggttagatgcgagttctgcacctcccctggggccttcagcagctgcattcttggcccagcagaggacttgcctgatctccaggatagcaaaggagctgaggccaaaaagacacatgggctactgctcacccagccccatattatacccttttcatcgctgcaattcaacataaaatcatatcattcacacctacccactcatgcattcattcagcacatgctcatttttgaaccggcaaatatatattagatatcgatgctgtgctgaatgccacagattgcaacaggaatcagacgccaacctgtcccggaggagctcacacatctttccaaaaccaatttctacttcttgggtcccctctcaatgtgtacaacatagagctttccttgcaaggctcgagcacaacgcagcagtcactccttgtctccaggcctggctgtagacacaatggaggctcctccttgccatctgcactccagtcaggggaggacaccaatccactaccaaatgaccatagccagcatttactgaatgtagacacactgtaggtagcagatttcaggcacccaatccaggtattgcaggaaggtagcttctatttttctataactgaacttgacttctttcttgggtcctcattctgctgggcatggatattttagttttagtttatttggggtaagctcagccagtgcaaagagtttgcagtctaggtagggtgttctttcccttctcttcccactagagaatttataaggtgccctggcactgttgagggaggagctacccgggggaggaatgaccctccgtcactgaaggctgtgctggaatcacatttcctctgtctccagccctgagtccaccaaagcatccatttcttccaggtttaaccacaaggcctttccaagactgcccaggtctccgctcatccttctccaggagatgctaatctctcggagaatctcctctccaatctgaggactggggcctttcctgccttcctgccaccaaacaggcctggagtggaggagagccagaagccttgccacctccccaggctacatccaggaagaggcaccaagcccacttgtcctgaatctcaaagcctacttaagagcttaggttctgttgtcacaagatcatgggcacaagccctcgcctggttctagagagagtggggtcagaaacactctcagcatttgagtctctttctcctcctctgtctatcctcctttccctctggcccagagaatcttcctccactccctggagaaaaacctatcccacacaccctcacatattcttcaagatctattggttaaggcatccaacttattgcttaagcatttcaaggactggactttggaaagccaagaatctgagttgcaaagtcttccttaaaactcaaaaactgggctcataggtgctcttctctttttcttggcatttgcctaaaagccaccctgaggacacctaggagaggccacctcaccacttcttgaaccaggcatgggggatggggaagaagacactggggaaaagctctgagtggtacttcagatcatcctgcctcaggtgttggttctgatcctctcaacgactcccaagggaatatgtcagctccattttgcagactgaaacccgagtctcggaatgacttgtccatggtcacacagttgctaaacatctgagccagagtgaaactctggggtatttgactttaaagtcccagcctttaaatcatcccacacttgcttattccaacttggacttgccggagtcccatagacagaggctactctcccaccgtgctgaagctggtgcatgccatgtttcagtaagagaaaggagggtgcctgggcttcgtctccacccaggtgcctctcccccagcagctgcaccaggccagctgagggggattttagcccgaatccagggtttctcctacagaagacaaggagtttgggcactgccagaattagaagaacagaaagaaaatgttctggatttctcatcaaatgcccctagcctgagaaatataactaaattcacccttaggtcatcttacaatctgtcctgccccagtgttccccactcagggaactgctccacccacatcctggtccccaaaccagaggcctgggagtcacccttgacatttcctcccctacacccctaatcaatcaaatcctgtttatcctgccctctgagagtctgcaccgaaatctctctcctctccttcccacctaccatggcccagcagctttaccatcatgtctcacggatctctgcaccgctcccaactggcctgtgcgttcactcctgccccctcctccagccctgtgtacactcccttccaccatcctttctatactctcctcaatcctatctgcaccctccttcaaccctgtctgtactctcctccaatcctgtccacacactccaaacaaagtcatatttccaagacaaatttgaccatgccactttctcccacagctctccaccacctccaggatcccatcctcagtgttagccagacactcccaaggccttgtgatctgccctgcctatgtctccagcctcatcctgcaactccccctacactctgtgttctggccatcaaaccaatgggctcctcttcctgcacccccatccactcttgcacatcctgcactctatgtctgaacagctcggtttctcttcttttcttctggcacatgtctgctctacctgcaggtcatcttagatgtcacttctcctaggaaggctttcctaacctccaaaacaggctcagttcccctcttcaattctcactgagcctcctccctagcatttccctctctgcattataattcctccctgtgcaagtgctcatctccccactgcactataagatctaggagggtagagtctgggtcccattcgtttctgtaccctcagtatttagtagagatggggtttcaccatgttgcccaggctggtctcgaactccagagctcaggcaatccacccgcttcagcctttcaaagtgctaggattacaggcatgagccaccactcccggccctctgcattcttctatttaaaactatttattgagatctactattggctagatttcggggatgaaaaaggcagacaaggcgccctgccctcaaggggttttcagtttagtggggagcaaagcaaaaagacaaacaaacagttaaatataacatctagtagtgataaatactccaaagaaaactaaagcaggggccagagagcatgggggcattgatgttttagacaaggtggtaaagggaggtctctctacagaggtggtatttcagcagcagcccgagcactcagtaggtccatggtaaaatttagttgactcccgaactaactgagtgtctcactcagtgaaagcctctaatccattttgctagaagtctttccctgtagctcattttgttccaagtcacaagcatcaggcttggaagacctgtgtgggagagtaattaacctaatacacagcgcggggaatggaagcccgaacccccagaagccttttctgcaaaaggaccagggcttgggtaataaaatggggctttcattctcattaatggggcaattgatttaaagaacagacccagtggcttattgatcagtgttaatcattagaaaatgctgacttaatgaatctaactgccatgaggcccctgtgggatttgggaaggccagttagatacaataactttgtccccttccagtccagcagacagatttatttacagaaatctggattttttttttctggaaaaaaagtcaaagagtcactgggggttaagccatttctccagctgatctgagagatcatcccaagcctttgtaatacgcctgtctctcctgccatgctctgttcctatctagcttttcaaaacaaactcttcattttagaatagttttaaattatagttagagaaaaacttcaaagatagtaagagagttcccatatcctgcacacctggtgagccccattggtaacagcttaggttaacactgtcaccactaatggacaaatgttgcaatattattatttgctcaagtccatacttaactcagacttccttagtttttacctgaagtcctttttctagttcaggatcccacattccatttcgtaggcatgtctccttagactcttcttggctgtgacagtttcttaggcttccctctgttttgataaccttgacaatattaaggagatattgggcagatgactgtagaatgtccctcaactgggtcttatctgaagtttttctgatgattgcactggggtttggggaggaagagcacagaggtaaagtaccattcacatcacatcatttgaagagtgcatgttatcaacacgacctatcactgctgatggtgacctcgatcacctggctaagattgtgtttgtcaggtttctctgctgtgaagtcattttcctccctcccctcttacacactgggctctttggaaggaagtcactgtgtgcaactcacactgaaggagtgggaagttagagatcctccttgagcgtgggccatcttcatgaattattgggaattattctgcataagagatttgtttatattaatatgagctcatggatatttatgttgacactttgggttataatccaatagtattttacttcttttcttgctcaaattactccacctttgggtactggggctcttgcagttggctcctatgtccccgtcattgaggggtttgggttttgtgtgtgtttgcgtgtgtgtgtgtttgagcacttctttactgttggcaccaaaagatgcttaggcttgctttgagcatctcctgccctggccctggagccactccaaggaacctccaagaacgcctgattccttttattactggctcctattataattttcataatgggctgtcattttgttttgtctggttttgtttataattataagggtaagtcagctcattgcataaaatatagcaaagatataaaagaataagaatgaaaataagtatcccaaataatccaagcagcaaagaaatccagcgttaacattttggggtattttcatctggtctttttgctagttgctggctcttaagaagtctgtgctttcattcttgatctctgccagaccaagggatatcatgggccctggtttacctccctgtcccagcatctgtggttggagcagcttccatttggccatcctcaggtggtctgctcgctgggcccctgcccacttctccctccagcagaccgcaggccaagaggccaggagccagggtgtgtcctccagcagactctgaggaagtgaatacatcactgttctgtgacttccaacgtgatagttggcctcattttcctcttctttacgaagtaaatgcgataatatatacaaagtgctcagagaaaggcctggtaagaaacaggtattttaaaaagtaaaaactgtcggctgggcgtggtggctcacgcctataatcccaacactttgagaggccgaggtgggcggatcacgaggtcaggagtttgaaaccggcctgaccaatgttggagaaaccccttctctattaaaaatataaaataagctgggcggggtggcaggcacctgtaatcccagctacccgggaggctgaggcaggagaattgcttgaacctgggaggcagaagttgcagtgagccaagatcgtgccattgcactccagcctgagcaacaagagtgaaactccgtctcaaaaaaaaaaaaaagtaaaaactgtcattattataaccataattactattagcaatctgaagaaacacatatctaatgatagaagttcaggcatagtgtggcaggcaggcccctgggagggatgaatttgcacaagcaaactgccttctccatggagacctaatgaaattcatccggtccttcttgagagtttgactgagttgggaactgtgtctccaccagaccagcaaatggaagagaagtttcctggggctctagctgaagagtgtgtactgaggggcagtattgcattgtggttgagaacatgggctctagagccaggctgctcaggttcaatgcccagctccatcacttacctgctgggcagcagcctgagttatttaaacctcactaggcacaatgtaaggataacaatattgactatcccataaggttgctggggatgccaaataagttcacaaatggaagaactttacacagtacctagcacagagtaagcagccaattaatattactcgagttactgtttttattacttcatcattcgggactcttccggttgcaagtacaaggaaagccaacccagaatcacttaaacaaaagggaatttattggctcatgtaactgaacttcaacattttacagaatctcattggctccaatgggctcatacgtccatccccaaaccaatcacagtgactgagggattatccaaggatcacactggccactttcacaggttttatccctaaaggaaatcacaggtaatagatgtggggctgcagaaatgcaacatgcacttttccttgaaactgcatcccttttccctgaagatgaagcttgaaagaactctaagaggttaagcatggagctgatgggcaagccacaggcagaaagagtagctgtgcagccaggctcctggccagggagggcagataaggaggggaggcaaagtttggtaaacaggaagctaatctatgggcaagaatcattttcttcagcatcctgacctctcctaaaatgttctccactggtccctgctaggacaaaggaattaccaccagactagagtcaggagtcctgggctggttctgctgtatgacacaggacaggtggcttgcctggtctgggccacagcctcctcccctgttgatgagcatgttggttgttccagcaccatgtcagccctagaaatctctgaattcttgaccagatcagtaattgctctcttgcgtttacttttccttcaaataaagagattggcatacaggggaggagcccagtacagacggcatgcttggctcaggttccagaacccagaaaccagacaagagttgggaaaccatgatggtggaggagggtgtgccactccttactagtgcctaatctcttcgagacactaatgtttcagtattatccacagattctgatgccaggcagcccagatgactggggtcagttattagcatgcttcctggaggtggttcccaggtgcaggctacctgcagtctggctggatgggccctgcaccacacttgcttctgggaagctggttttggggttgccacaatctctgaaagaatcactaggccaccctctgagtgggtccttctgtaggaattatggataaaattgttccactagtcttaccttcttggggaacccttcctggattcccaggctgggctgggtgtccctgcagcctagccccacagccctcctgcttctctttctcatcacagtcttgttatctctaccaactgtaggcctgccccactgatggtgtgaataaagggactgggtctctctagcacctagcatagatctgatacatagtgggtgatctctattgaatgaacgatgaatgaatgaatgaatgaatacatttagataattcagattactctttctagctcagcagtgtaaagcaggaagacatgctgtcaatatgatttagggcaagttttcaaatctctctggacctcagttttacctcttgaaaaataaatataataatttgtccttacttcatgagactattttgaagattaaatgagataatgtatacactactactcactgtccttacttgaatattcctaggtccttggtgctacattaggctacatagaatgtatttaaagtaatagagtggtatttaataaatattcattttctttccccagaactaccttaaattaatttgttgaaaggacagatggatggatggttgatggaagtagcaggcttccagcagcaggggatggagtgagtgtgtggataccgctggatcagcagaaggttataccattttagagtaactatctcggacttcggagagttcctgggtatgaaggtttggctttaattaaagtctcagcacagtgttaaatgccattttattttaggtcataattaacactaatgagatgagtggattacaaagagcacacattttgagaaagtgaaaaacaacatctgagcttggtggtttccattttcgcttttccccctcccatgctctgttcaattaaaagttttgagaaaatattacaaccatactccttgtctttgtggtaatgaagcatattaatttgaatgtgatgaatacaatattccactgacttttttattcccttatctacaaaagtttaaaataatggaccaattaaaccaggagagaagaatgcagggtttgcctggggatccaattcagcaaccagagaactgaaagaacaaaattttttgacggagtctgggccagacttcatcccttacctatagctgacaaacagtaagtcaaattgggcagatgtggaccagcgcagaacacatactatattgaggatcgaaaggccaggttccagaccgtcctctaatattttcttagtgaatatttgttggatgaatgcatggatgggtggatgaatagatggatggatggacagatggacggagagagagatggatgaatggattgttggatgaagttgaaagatgaaggtagatgacctcccatggtctgattcttcctaaggtagcaaattaagcctaggatgggctgacctaacccttccaaggacttagaagtcagggcaagaacttacagggaagggttcagttctctgacctcactaccctagaggcataaactataaattatagagttggcctgagctcagtttccctgggagctctgctctaaagcagagccccttgaccctgcaccaatttggttaacccgagtaaggctgagcttcccccagcaggagctcctgctttggaagagaacatcctgggccaggcgcagtggctcacgcctgtaatcccagcactttgggaggctgaagcgggtggaccgcctgagctcaggagttcaagaccaccctgggcaacatggtgaaaccccatctctactaaaatacaaaaatttagccaggtgtggtgatgcagcacacctgcagtcccagctactcaggagactgaggcaggagaattgcttgagcctgggaggtggaggttgcagtgagctgagatcacaccactgcactccagcctgggcgacagagtgagactctgtctcaaaaaacaaaaaaaaaaataaaaaaaaaagaagaggacatctggagcaggcctgtgaacctgacacatggtccaggtgtctccctgaggacttctggaagtctccccacctctctgtggtcctttaggcattaacaccaccttgtcactgtgtcttctgaggcagtctggaagttcataccccacaatctctgtgtaccttgtcccccattctgttctctgcattgcagatggtttaaaacacacacacatacacgcgcaaaatgttgttccttttcttaaaacccattgtggccaggctagacaaatccttaacacggtctacaatattctgcatggcatggcccctgggtgcctcccaacctgatctgtcacacaccacctccacctttgcctgttccctgggccctagcactaacctttggttcattcctagacaccttttcagcacttaggcccccacagccctcagaacctttacacttgctgtctcttttgctttaaatgttcttgccccacctaccacctagttaatgccttttcctccttcagctcttagttgaagcatcacttcctcaaggagggcagccctgatgaaactcattatgcaaactccagcctgggttgggccttatctttatgctgtcatggccctgagtattcttcctttatggcaccaatcacggcttatatgatatacttatgctattatttgagttatgtctgtctcccccagtatgccactagtattagaatcattgatttttaatcattgtatccctagtgcttagcacagagcctggctcataatagatgcttaataaatatttgttgaataaatgaatgagtgaatgaataaatgcctcattcaagagctttggctctttctgtactactacattacttctattttttagctcttaattctcaaagcactttctttgtgctgggcttatgctgggagcttagacagtaaagcttagatggtaaactacagttgctctcaagcagttcacaatgtaacaaaaaagagacacaaatacacagtgacaatacagtgtgtcgagtgctacaatagatggaggggtgcagttttatggatgtggagaagaaatccttctattcctcactggaggcttcactaaggagatattccctaagctgcttctggaaggaaaaggtattggccaagaaaataagggtggaggcagaatttcaggtgaaaggaccagcatatgcaaaggctcagagggcagagcctggcactggaaacaaaatgcaagtcacttcgtggactgagacctggatgaggacatggggctatgagagatgaggctggggagggagacaggggccagatcacagaggcctttcaatgacagcaacatatggcagctgcagagacagcatggaagggactggcatggtgagacctgtgatatggagaactccctctcgaaggggttcagaaaagagatgtccatatttcaagtgaaggacttcctcccctggagaaactgaggctctgccccagggctgtccatcagactccttcccagaatccaaacgcttccaaaggatgttcagtgtggctgaccttgcttattcattgtggggagaattaatttcagggtggagaattttaaaaaaatataagattaagcagtgtaatcagctgctgctgagagttgcaaatgcaataaataataatagcattgagagctgtttttaataactcaccagtgtaatttagcctcggcttcttagagcatatttaaaatatgtcatagtgtgtctaatggcaaatgcctcattgccagcctctgaagacaaatgtcttcccaggagggaggggggcagaaaatagaggagaaattggaggatttgattgcaaacagggtgtaggaaggcaagcattgttcattctgacaccactaattcaaaatctgtgatctttgcctaggcaataggttttagttggtttgtcttcaagggtgaaacagatggatagcaataatatggtaaaggagatatttataatttgtaagagaagaggttgttttcagaatctatagaatcaccattttcatgcagtccatattctaattacagatcatcctggactatctattatagcaggtccccaggcaactgatatcttgacaacatttgttttacttagttgagttactaaatattcatgataccatgaaaatgtgttatttaaaagtgttcgatgaattctgagttttagtaattcatatgtgctgtccccgcccaaccccgattagtctaaactggtgagatggggctaggagtcctcccctcttgggtaacagacttgacacagttaaagtgagacaaactttggagtcagacagacctgagttcaaattctagttctaccacttactagctgtgaccttttgcagcttaaacactgaggctctattcccgatctgttaagtgagagtggtgatgatgacgaccatgacagctaatatttatggatcgcctattgtgttatctccaacacaacgatacagtgacgtaggtctaccatggttcctgtttcacagatgaggaaacttgaagcttagcgagctcaagtaactttcctgaggcacagggctagtgaataaccactctgggacctagtatctgttctagctggtttcaaagcctatgctgttaagtgggctctgatactatcttgtacagttgggggaagatttgagaagacatgtgtaaggtatagttcctggtatgtaattaggactttataaatatctcttatatggaaggactgaatgtatcttcctgggctgtgtcctcgcagggagatataacatctatgtcactctcaacgctttattaatgtccctgtcactctatacccttgtccaagttactccacaccctccaaagcctcaagtttttaatctgtaaaatggtggtgggcggaggtggggagtgagcgctcttacacatactactaggttgggggtaaattagtaaaacaactttgggaaacaatttggcaagacttagtaaaaggtgcatagatcctgtgacacagcagttttattcctgggataaatgctaaagcaggttgtctccatctctgcactactgacatcctgggacagatatttcattgtgatgggggctgttctgggcattgtaggggatttagcagcatacctggcaatttattcccaagaggaaagcaatgaggaaggaaggaaggaaggaaggaaggaaggaaggaaggaaggaaggaaggaagggagggagggagggagggagggagggaaggagggaaatatttaatagttaagttacatccacaggtttgattataaatgtgtgtattgaattggaatttctgttgaaattctgatcccttctagacaaagaaggtaaaaattgaaacatgtcaatggatatctaaatatcattactcactggctttatttgcaaatggctttccattgacaacagttacattttgttcaaagcaacaaatgattggcgctgacaatccacaggaacatggtgcagtcattaatgaatgtgctcattattcctccctgccgggaggcatcgactcccgttctccagcctgttttaagcagacagacctacatctgcacctgtcagcttggaaccctagtaggggagggggatgctgatgtgatggagaatgaagaatgggccctgcaggctgacattttgggagagtaggttctgaaatttatcccaaaggacatggaatcctggaagcagggttcaagatcctcccaaaattgatctcccaggatgcttggaatgattgttccgagggttttgtaaaatgccaggggaaaaccaggaagcttctctccagttgtcttgcctccttcctctccagtctccatggagctgactttgagaattaactcctgagggacagagaccctgggatggagagccagccctgctggattccacaaggtgctgcttaaagcacaacacctcttcccaatgacaggttctgaaagaaggccttgtagctagatgcacagagggttttgttttgtttttttttttttaacctttcagcatctgtctaaaattgctctgggctgggtacagtggctcccacctgtaatcccaacactttgagagctgaggcaggaggatcgcttgagcccaggcgttctagaccagcctgggcaatatagtgagatctctatgtctagaatgttttttaattagctgggcttgctgcctgcacctgtaattccagctacttgggaggctaaggtggggggatcactcgagcccagggggctgaggctgcagtgaaccatgattacaccactgaactccagcctgggcaacagagtgagaccctgtctcaaaaaatatatatatataaataaataaataaaaataaatggccaggtgcagtagttcatgcctgtaatcctggcactttgggaggccaaggcaggcggatcacgaggtcaggagatcaagaccaccctggccaacacggtgaaaccctgtctctcctaaaaaatacaaaaatattagccgggcatggtggcacgcacctgtagtcccagctactcaggaggctgaggcaggggaatcacttgaacccaggaggcggaggttgcagtgagccgagattgtgccactgcactccagcctggcaacagagcaagcccccatctctaaaataaaataaattgctctgtaagttgacaccactaaaaacatcattagtagttgtaataattaagataaaggagaaaactgtgcagagcccagcacagtgcctgctccatggaaaatcctaatgacatttagtttccctctctttgcccccattttcttatctataaaacagaaataatgctgtatcctaactcaaaagttgattatggagagtggcatagtattgtttcaacaaatatttattgagaaactgcaacacgcaaatagatgtaaaaggttgaacagaactttgcaaattaaaaatcctaaaggacattttagaccttatgaacttcctaataggtaagactttttaatctatctgcagtgtccaacaggtgcaagagcttgggcggactgtgaatatctaagaaaagagagagagcagaaaggagggaggaagatgaaagaaggaagggaggaagatgaaagaaggaagggaggaagaagggagggagggagcgagggaggcgggggagggagagaagggggaggtagggagggaaagaaggaaggaaaggaaaggaaaggaaaggaaaggaaaggaaaggaaaggaaaggattacaggtgggagggagggaggaagggagatatcattattattgtgcaattgttatcattatataactaatttaaacaaacccatcctgtgcccacaaaagggcaccaagataaaggctaagataaagaacacacgaatcattttcccattttcgtcagtgatgggaatggtaatgattttctctctgaaccataaccatcttgcagttaaataattgctttctgatagaatcaggagctctgagatggtgctctgaggagttctttcatttctttcgcaccttttaaagaaaagaaaacttcaagtgcaattattggcattattttaataccgactgcagcagaacattctggaaaatgaggcccctatcaaattagtttttccaaatgaggtttagacagtaccttaccaggagaaccactcagaaagcccccatggcagcagcaagccctgttgagtcaagggcacatggatgtcacactgcacatgtgttttcagataactaagtgaactgctccgatcttgtgggtcattgcaccacggggcctctccatttacttcaggttacacagcaacaagcaagctgagagcagcagaagtagctagctaaaattgcatttgattttgtgactgctagaggccaatactcaagtgaagtttaagcaaaaacaaatcatactcagctgaaaacatttgcctggaagaaagatctgtggctggagaattggagttcatgcacccagcaatttccagaggaagtctgattcccctacctgaagtaacactccttcctctccccagatccagatctccagactatacgtactcaatatatgacttgtccatggggcccagctgagcattattgcctctagcttatggttaataataacagtaataattatactaatattattctttctatgcataattactaattcatcttaatctcacaactctatgaagtacatactgtgaatgtctctgttttacaggtgagaaaacttaggcacagagaagttaagtaactcatcatagtcacagagctaagtaggaggcagagttaagagtcaatgtaggcttctgacccagagattgtgctctggacctctgtgccacactcccacttactgggtatcagggactgtgctgagcagtttatggcatcatctcattttgttattgtaacaaccctatgctatgggtatcagtattattcccaggtaaggaaactggctccttttggagcttgagtgacttatcgtggtcacacatctagtaagtggcagagataaaattgaaacccagagctaaaattgtttggcaaaaacttggcatttgtgattgtgaccatcttggtttccaagacgcctgggggactctgcagaccatggccagtattcatttgtcaagatgcaaggacctaaactggaatccagtcttttatgatgtctggatcataacaaaagtcaggtatctgctccatgaggccagctaatccccccacaaccccacatccccctgacacacatcatcctcacctagagaaaccttttcacaaataatcaaacctttgtttctttaaggcaaatggacctaaggggaaaaaaaaatgcctgtcagtattgataaggaattgaagaggaccaacaatgtgaagattcttggccaaaaaaataaaatagtaatttgggacaaatttagtaagagaaatatcagaatctatgcaggctcacatctccaatacaaacatattcaccttacactctatatggaaatagtaaagagcaatttgtgaaatagattccatgagtgccccaattagggcaaacatttctcatcaaatgaaggatggaacttcaataaagatttcaaagctggttacatgtagagagatttgtgaagaaaccttgtagctctgatggaactgggatgtgagaagaaggcaggttttctgataaacaattcctgtatctttcacaaatgccaaatcacagactcagcttgggacatatgaggacagcacagactttggaggcaggtagattttgggttgtcacgcagacacccactactatgagacctggatttccttctgacgttattggggataagaagtggcacctcaccatttctaggaaatagtaggtaagtctttctggttgccactgaggtgactcacctgagacacagttgctcctaaagttcaaggttaggagacaatccagaaggggagctgtctgtgaagtcagaattcttggaagaatgtaagtctttacacagtaacagcaaagcagacagtgggaaccactactctgccttcttgcatcattctttcctagaaataccagaaagcagtgagggattaagtctaattcctggcacctgaccttatatctaacagatgctcagtattacctgttgatgggacctcactgggaatgttttgtgtgcagtacaaaagggcaatagatgaaactttgggacgggagcccaggaaaatggctgagaggagagcttatgcctagcttatgcatgagcttgcaaaaagggagaatacacgggagggaagatcagcaacagcatgagttttataaggcagagagttgttgggaaggaagcagcagggagaggggaaggagtaagtagaaacctagaagagatacagctaagataagccaagagaacaaagtattgacttaccagaaacatggaagtcttcctgcttctaatttagttccgcatatctggatatgtgaatgcctaaaatcccattaagcccagtgggttaattattacacttgctagggccccagaggagaggaaacacagtaagtcagaaaaacctctgggcaggtgaatttctcaggttttcttctgggcagatgggatctggaatggtagcgtggcatcctggtaattcagagacagtggggagggtgaagaaacactgatgtgtagcatttctgtggtgtcaacaccctaccatggctgatttcaagctgacaaaggtttagcaactgccttgctgatttcctgaaaatttaacaattagttttcatgagatgcagtgggctgaccccaggacatcactgcctacacgccaatgagaatggagattgacacaaagaacagagtggagagacacagagcagggaagacaagattttcccgagtctcaatccaatatgtagactatgtctcccttttcacaaagaaggaaggggaggagagaccagcattcacattcagttattgttgttttaaatccattacgcacatacataggagaaaatttcagcaacagtcaccctctgaacccagttcctcagttctctccagaggcaactaaaatgctcaattattagtgtatccttttggaaatattttatgtatatgacagtgtgtgtgtgtgtgtgtgtgtgtgtgtgtgtgtgttcctttccaatattaaaataatattaacattggtaatagtggtactaaacaacttagggtgttttttttttcatttaatagtatatttttagtatctttccaggaaaagatacatggatgtgccacattatttttaatggctcacatggtactccttttatgtatgcactataatttatggaaccagttttctcaccgatgagcatgtaagttctttcagtcttttactgttataaacgaatgatgcaatgaatatccttgtacatatatatttgtgcgcatatgtaggtatccttacaagtggaatttctgaataaatggatatatacaatttatttatgaatttaccttcctacaagtgattcaagagagtgtctttgctccacagtgttgtcaatatagtgtattctcaaaatctgacaccaatatgtgtgaagtgcctgctctgttcccacactttacacaggttctcttatttgcgttaagtttatttaagaagaggaaactgggcctcatggagatctaggaacttgcccaaggacaggtctctgtgactctaagagtgcaatcttcccttttccccatgtcaagcacctttccccaccaggctcactgctgacaatccagtgtacgaagaagggaaattacccccacagagcccaaaagtttaggacatgccgacagcatcactcttttgcctcctcattctctctttcatttccagaacatttgctcactcagtgctgcccagtgatacttagccagcctgattacccatctaataatttctgatactaatataaaaccttcccaaagacaaatataactgagacgcactccagcttaccatagctttcctggtggtacagtttccagggacatttcactgtgtcaaagcagggaccacatatgttccagaccagcttgttgggtttttcactgggaagtgaagacaaattgttgtccctttgaaaaagcatctttcatctctccatctatctgcgatctaaagcaatggggctctttctgtatgtctttcaaatggtctacactgacacacgttttctctgagctgccgagagaatatgccatgagatgttgccagtgatggttacactcagctagcagaagattagggactggttaaacctttggagaaattgccttgggaaaagaggaaataaaagcaaatattactatgaaacatagagattaccaggtaggaggaggagagaggtggagggaggggtaggagtggaaggaagggagggaggcagaaagaggaaggcagactggtggaaaataaaccgtgcactttagaacagcaggaagggaggcttggaagcctggttttctggctttgaatgaccgcctagcgcttgccggtgcgccagggtgctgtgaggatgtgggcagagggcgagtccgaagggctccagacactgggaatagtggtggtcgtgtgctcctccctgaaacttttgcactacctcggactgattgacttgtcagacggtaagcgaaccctggagcttccccgttttctgtgaatgtgtttttgtggcttcggttgctgtgacagtcgtttcgaaaatgcacggaaatgagggcggagacccgagagatttgaaaaagccgggctgaaacagcgtggtattggtccccgcctccccagtcgcgccccagtgctgcgctgtccgtcgtgctgaaatgtggtgcgcctggggagtgcgggagccaggaagttagggtctcctgctccggccctatgagcatgtgagtcttgatggattattagctatgggtgaggccagcacaacacatcacaattctctctgaagctgtctggtaactacgtatattgttgatggaagccagtgacttttaaaagccattatgttgattaacttttttaaagaagtttaggagattatatggaggtaaaaacctttgtaaaatgctaatcacagtgtctgacaattagaacacatttaataaatgtcagtttctttgctcaacccttataagaacccttattccaaagccacctcctcagctctgacttcagctccattccttagtgagaatggggttataaatccaggttaacccgattgtttaggattagaaagtgatttggtttccaacgttgaaggagttcaagaaacaaagagttttatttttcctccttatgagatattgttccaaatagaacacagtttgtctagatgatttttgtcacttaaaattaggctccaggaaagattccaaatttcatgagcaattgggctcataaaacaagatcaaactccaatagtgtatatccaaagtatgtataatgtgtattcggtgtatattcttccaccactgcatggtgtagacagaatttctcttccaaggggcaccacatgacaaaaccgtacataataatgaaatgcatttgtagacaaaggactagctaaaataccaactgaaagtgggaagaccagaaactgaagtgtaagatgaggtaagccctggagtaagagtcaagaaatccactttctatccataatctgtctcggtttaatgttggtcaagtcattttttaaaaaattctaggtcttggtttccttatgatgactttagatctctgttccttggaattctagagtgatccaaaggtttctttgaattcagttttgtgggttgagacgggcagccagactgtgagtccctcagctctgcttcaaccagaacagctccactttactgttcagcatgttagccctgtatgtaaggatgttttttagctttagctaaaatttagtgactctatgaccctaaggccctgcttccctgagattttgaaagctgaagcacattcggaaaactttttcttccttaaaaatcacctgaaatctgacaatctggaagactagttctgtctgctccagcccttggtcccttagatgtgcttttctgaagatccaaactcaacctgccagtcaatataccaactgagcagagcccctgttctccaccagatttcaagagaacatgttccattcctgttcagagcttcagagcagcttccgctaagattgcacattaatgcaacagcgtcctattttctttgtttctttttttttttttttttttttttttgatgagacagggtttcaccatgttggccaggctggtctcaaactcctgacctcaggtcatccacctgccttggcctcccaaagtgctgggattacaggcgtgagccaccgcatctggccaagcttcctactttcttataaggctaaagttgcagtagaaatattcccctgctcttcctttccatatcataagtatccatcttccttcccctgctttaacttctcatgattgcagtttttgttttattacaataaaggatatcaatcattcatctaatgttatagcaatgaggggatttaaggtgaaaggtagagaacatatgttgagaactgtttctggaaactctaggtgaagaaaaagaagggaattaacatttattcaacacctacaatgtgccaggtacagtgctaagtgcctttatatacatgagttaatataaacctcaaaataatgctctaaggaaaacattttaaataatgctgaagttaaatatcatgattccttttatataaggaagaagacagatttagagaagttaaataaaatttccaaaaatgcagcaatagcaaggtggaggtatttgtctctaaaatttcaccctctgttctgtacaccaagtacctcagcaagtaatccagttccagatgggatctgcagtctgccattaagtctttaccacacataggctcttatgctagagcccttaccatatggtccaaaatgccatttttaatgtgtatttgatatggagactctgttcacaatttgagtactaaagagagaataccacctcctagtagatacaccaggaccaatgtaatgctgtcattctaaggagagcagtggaacatctccaaagaacccatctgtagtcttccttcggcccttgatcttattcctattttatttttaaggtttttttttttttcttcgagactaaatctcactctatcacccaagctggagtgcagtggcatgatatcagttcattgcaacctctgcctcccggactcaagcgattctcctcactcagcatcccaagtatctgggactacaggcatacaccactatgcccagctagtgtatgtgtgtgtgtgtgtgtgtgtgtgtgtgtgtgtgtgtgtgttagtagagacagggtttcaccatgttgcccagggtggtcttgaactccagagctcaggcgatccacctgccgaggcctcccaaagtgctgggattacaggcatgagccacagcgcctggccaatcttttagggataattttagaacagtatacagatattgagccaagagtcaaaagagctgggttgcaattctggttgtgccatttatcagttgtgtgaggtgggacaagtctctttttctccctagctttctctttcctcatttataaaataaagaaatgagaatgatagttgtattaatttctgaggactgccagaacaaattactacaaactgggtggcttaaaacaacaaacatttattctcacatagttcaggaggctagcagtttgaaatcaagttcttgacaaactcccctagagtctaaagtctctagagaaggattcctccttgcctcttccagcttttggtagctccagtgttctttggcttgtggcagcatcactccaatctcagcctctagtttgtggtaatgtattatgacagtcttaggaaaataatacatcagtatttggaaatgtttcttcatttgccacaatatgatatcaaataaaatacatccacttaaaagttcaggtatggatacacccattgatttggaatgctagtgaatgtaaaggcttaggtcaacttctctctgcagttccaaggaggatgagaaatagcagccttgacctcccaccagcgggagtttccctccttcatccctggtcactggccacacaaggacctggcatctcccagtaaatgtgttcctctgcaacctgagccacaaacctctctctcttttatctctttcctctttctaccttcatatttggttggctatttttagttcttctgcagatatagttacactttaaatgacacacagcctttaattacttacatgttgacttgaagcaatgtctgttgctcaccttcttggaaatatcagaagacaagaacacttttacttcctcctccttctcccatccttctctctgtctacttaatctgtttatcatattctcatttttacaccatcaaggtttataatgctcccagaacatacctccttcaaggtaaatgggaatggtaacctttggcctctccttgcccataaggacaacccagtctcctgctctgcgtgggttcccaatttggccctaagacttttctgtttgtatgatcagcaaaaggacatcaaatactttccatcctccaatgagcagaacacattctgtggtcagaagccttctcattacttctgatctcaaagggacatccagagttgcccaaacccaggccaaccacccttccatttagccacagcctgaagatcccaactatgatcaacaaataagactgactccagatcccactctgccaactgcctacctaatacccagactcttgcagctgagagagtctcttctaaaatccagcccaaaaggcacactagatgtgaggaccagaatatcttgtattttgtagtctattatagcaagcataataaacttatttgtttgagaccgagtctcactctgtcgcccaggctgaagtacagtggcacgatctcagctcactgaaacctctgcctcccgggtttaagcgattctactgcctcagcctcctgagtagctgggattacaggcatgtgccaccgtgcctggctaatttttgtatttttagttgagacatggcttccccatgttgaccaggctagcctcgaactcctgacctcaggtgatccacccacctcggcctcccaaagtgctgggattacaggtgtgagccactgcccagccgataaactttaaaattactttttctattccatatcatagattctgggaggaaacaaggcccaatttgagtaaaagcaactgcatttagctggcttgaacttcttcagagaaagaacaacataaaatattcagctcatctgattttttaatgacatttcctttttatttatattcaattacacaagtaatacatgaacagattctcccttttttaaaccatcccttattctacagatcaggtgaaagtacttgttgctggcctgtacttcccatccccacttttgtccccaggacaaagtactatcaggatactagcattcagagtgagcagattcctagtactgacataaggaggatcaccatctaatttttaaattttaaaaaatgaacacaaagtctattagaggaatgaaatgaacctgctttgtaggtacataatatttctctctccagagagaaaggaggagagcacacataagataggaagatgagagctacaataaatgagagaagagagaaactgtcagaaatagcagggcagaaagagggaaagaggtgagaatgagagagagggggagggaggaacagaggaagatgcgaacaaggagagtcactcagttctgaggcaagcacttgattctccgtggttcatttgggtatccaagtaagttatttcctataatcattggcctttaggagtctgcttagctaattaacagtttgcaaattgccaattgttttttgtcccgcattctccagagactttacactgcaaaggcagaccacagcagcccaccttacacttgagttgtggccaaagcaccatccccaccagacaaagccagccccacagctgaccccggcctgtgagtgtctgaaaactggctgtaaagaacattctgtctagttacttcctcagtaaactctggggctgggcactggaggttttctgaaaggaagtgtttggtgtctcacacagccatgtgcttagtatattccatgcagcactccactgagccagtgcccttgaaatgagcaagcactgcagccatcctcctttatttccctcaaggcaatatccaaggattaaaaagtcagagccgtctgcagattcctcctctctaccttgccctgcactttttgtgcccttcctcttccccctctccagccccaaacctctctcctgatccacggtactcctcctgggatgtccactggggctgatcctcccccattctccccctgagttccctgctgttaatctgtctccagcaaaattaacctagcctatgtcccatgccctctggactctggctgctcgtcaatcactcttaaaaatccggtttctccttaggcaatcattttgttttgattttatgtgtaaaaaaacctgagtaaattttttttttttttgagatggagtcttgctctgttgctcaggctagagtacagtggcatgatttctgctcactgcaacctccgcctcccgggttcaagcgattctcctgcctcagcctcttgagtagctgggactacaggtgcccaccaccatgcctggctaatttttgtatttttggtagagacagggtttcatcatactggccaggctggtctcaaactcctgaccttgtgatccacgcacttcggcctcccaaagtaatcactgctgggattacagaagtgagccaccgtgcctggccaaacctaagtaaatgttttaaaattatactactaacatagcatacaggctttagactgttggttgcttttaagtttgcttactttaaaagctagagagaagatggttgaggtgatcttgtctccttcagtattcactctgagccatgcctcctgaggaagtttgctttaggggaggcattgctatgttatacactctacgatgcaccagcccttgcctcagaaggcaaggtttgaaccccaacactgtcttttgcaaactgttaccttaggaaatagattttatctccttaactcactttttacatttgcaaaatgggtaaattgtgactacctcacatggatgtcatgagatgaaatgtaagaatgtgtgtccctggcatatagtaaccactttcgccaaagactgagttatccaactacagacagagaacagctggtggcctaatcaaagggagatacaaaataacaatgccaagactggaaaaggaagttcatcttaggatttccaagagaaaaagaaatatgactgtattataataggtatatttattaagctcttaccatgtgccaagcaaagttctttatatacatgatatacttcatatacattatttcatttagtcctcatggctaccaggtgagcaccattattttcccattttacagatgaggcacagagaagttaagccacttacctaggaagggcagtcctagttaagaagctgggattcaaatccaagaggctggattccagacctcaggctctattatgagaagtacctaaatagagattggtttaaccaaagcctgagtcccaactaagggcaagactgtgacacagaggtcactaatcagaatgaaagattgagccagagttgagttgttggaatgtattttggtacatttaggttgttttaagtatatcaatctccattccactcaatggttgagttcagtttcaagttttccaaatgctttatgggaaagtcatatttttctcccattgcagcagggatgccagcgcagccatgcttctcaaccaccaagtagaagcaaagccaaactgacccaagaagatgaacagagggaatccagggagttccaacttgggttcacagctgcaattctcaaaggatggactaagccatgtcacccctccagataacacagtcatattaatagtgaccttttggaggcctccctaaacagcaggtgaagtcccaaaatcattagattattcctggcctcaattgtggcccagagggagagccctaagatttttccatgggaacaaagatctaaattctgggactatctgggccatgtccaccctgcaccatttactacaaaatgggctgatcctatggaagcacactacctgtgttgtggtcatatagatcatcacctggcttctccagggctaaccagttagcatggaaatgggacacccaagaacaagaggatagaaagaagggaagggtggaaagaaggaaggaagaaagggtgggagggagggaagagtggtagttttggaaggaaggagggaatcagagctaaagataatacatgatatgagtcagtgttcaatgtccctgaagattaggggaatcaagctttgcttccaggagaattaacacaggagagccaacagagatgtggaaatttaggaagtcagaggagacattctttcattcattcattcgttcattcattcacttgctcatttttacatgaattgactctagaacagatgctggagatacaaagatgcatgagacttgcccccatcctcaacagtcattcacagtctaatcagaaagagagccttgcatttggaatacaatatggagtaataatacctctgtgttcagcctgcacaaaatactctgtatgcatggtcatatgtcccttgaaacaactttatgaggaagatactactatagtctccatttgacagataaggaaactgaggcttagggaggtcaaataacttgcccaagtaaaacaactagtaagtagctgaaccacaaaacagagattcatgcagaaagctgtacaacagaagaaaccaggactacatctgcctcaaaggaaccagagaaggcttccaaagaaggcagcattttaaatgggttttgaaggatgtatagcagctatagaggcagagaagaggaaaaaagtcatttcaaacagaaagaacaggttgtgcattcaaaggtgaattgagaggagagaaaagcatgttcaggaaaagacaagacatttgtggccctgggagctgagatatgccctcgggaaggctggagatgatgtcaaagacgaagattggacaataatgcccatcaggccaggagccccctttctggattcgctgcttccactcttgtgtagaatgatctttttaaaatgttcatcaaatcaggcccccctcttattaaacatttcaaaggttttctgttctacttaaaacctaaaacccttcttttgtatgcaaggcctgaacagcctgcctttatcctgtagacaaaggggagatgggaggaggagctaactcacaaagacagtggttatgtctgctctactcacacacatccctactgccccgcacggtgcccagcacatagtaggtcctcagtagggtgttgaatgaatgaacaaatcactgatgaatgacggccctaagcagggatttttctccaaagcttcctcacaccttggaatgcatttgggggcccaacacaaaggtttccaacttcaacagcaaaaactccacctcccacacaatgtagagttacttcttgctcatttccagtgggtttctgtctttctccacagcctgactccttctcaaaatctctctattcccttccaaatatacattctaaatatttacagaagcttgttattctcctcagagctggcctagagttctcctgatatttcaaagaatttccaagaatagggaaatctcctgatatttcagagaatatcccaagaatagataaagttccatctgacaaatagatgctcagtaaaatctggtgagtgaatggattaatgcaaaaactaattatcatgctgttcatggcaagggatatgataattttttcaagtccaactctggggcaccctcacttccacgtcacatgattaggaaaagggcccaggtggcattcagtagacatagactaagcctcaaccccagccctcaggcacatcagtgccctctctaggctctctctcaccaactttagaattgaattacatcagttgtttccagatggtgatctgcagaattcctttaaagaccacctgtgggatttgagggaggaaaactacactctcccaatctccctctttaacccaagcatctgattgctttcatctgttttacatacttagcttctgtgcacaacttcctttgattaaagagttccttgcctttatagtagtggatgatatctaaggatgatgtaaaatactgggtgttagctaaggttttaccaaacttaaagcctttatgcttcataattccactttattgatgtaggaagacaaatgatagacttactttcaaggtggatagaagggatgcgacctagccaaggctacagcatttctctatggcaccactgccatgacaaccatcagtttgaatgccttatgggtgcatcctatgggttatgcactggccccaagccataacccctaggactctagagccagcagcaaacacaaaacactgaattaataatgagtgagatctctgttcccatagctgccacaggctaaataagttgagggggtattgtaaaacccaagatgagatcactgagcctctggtatcaaaaaggtgtatttcacagaatgtttagttggacgagagcttgaagagcatggaaacgatctggtatcattctggtcaaagaccagaatttagaccccagttctgccatttgctgactaatgactttgggcaaaatacttaactttcctgagagttagtttcctcatctataaagtggggtaatataacccaccttgcaggatactggtaggattagttgaaataaattgtaggagaacatttggctcagtgctaagcctatataaatactccacaagggcacagagagggaatgacttgcctaggatctcctcctggaaatcacacaacaattccactagtatcatgtggcccacaggcagctggtgggcacaaccacactggttcagcattgccatggtccaagaggcttctggtgcccagggaaccagcagggtcccctgagcgttcctcctcagctcccaacacttccctccaggcaccagtatgcagggcaaggtcctggagggggcgccgaaacaccactcgagatcctcactctcaggaattcaatatagaaaacacattaagacctgtttacatggaactgctgtttataattattgttccctatgggatattccccactgcttcctccaatcctcttttaaactgctcaactaatagagttttcctggcttccccagggagacattcacagatgctaatagagacataattcaaaaattgcttgatatacatgccctcaattttccccaagaaccacctaagtaaagagccccagacatgcaacacattcattggccagatgcaatttaacatgcgtgggattaaatatacaggctactacagccaggttgtcatcaagcagcagcaggcatggcattttatcctaaggtaccaccacggccaaatgcaacaggaaagaagcaggctgctgggtgggacccctggaagatcccctcctctgtaatttccactgcaagcttttcccaggccttttcaggcaaagcggggagttttgaaaataaatcccccaggcttggagaagcaaagaatcaatgctaagcagctccggaaataatagcttccatctctctgatatataaagaggataaggaaggcagaaagaaggggcatgatattatgagattgcaacaatacattgcaacattacattaaagaattacagaaagcaagatctagcttcagatgccagttcatgcacttactccctgtgtgaccctgggaatcacttaagctgtctgagacttagcttgtctaatgacaaactggggatactaatatcacctcccaggattgttgggaaggtaaatggagattgacaaatgtgaacacacttagtatgtctttacatagtaggtattcaataaactcttctatatatcttctctttctgaaaatctgaatatggggagcatggatatgcttatatgttggttaaacaaatgcatgaatgttgagcaaatcagaaaatactaaaattagaagactaaaaggagtaaactaggaccgattaaaagaagtttgccttccccaaaactcataaacttaatgaaacttgctatctccagaggaaattaatataaatttaaaatagcataggtttgagatgactttagcggagtttctggagaatagatccatcactggttaataaactaaaaatatagagagaactgcccaaggttacacgagtagaaatttggtgtccccaccactcctttttattgcagagggaattgacattcagggaatggaaatgcccagcccagaattggggatgtggtctgggaacccaggtctcccatcccactccctcgccctctcaccccctcccgctggtcagtgttctttgtcctctgctggcatccctggggacgggccagcccccatccccccgacacacacacattgtcccttcaagatggagccaggctgacaccacgtagaatgacctggaagcccccactcagtctaccagtcctccctcctcacacaggaatagatgggagggaaatgaaataagctgccatctgctgtgcatcctctgtgtgccatgctctgggtacccatctaatcctcgtgaagaccctgagaagtgagtgttcttcacagactaggcaacaccagaaggcaggtgaagaacgtacagaagctacagagtgcacaggtgacaggtatgagagccaagccattcaaactccctgggtataggacccagctcttcccacgtctctgcctttaccgaatcaaacacctgagcacggaagaccctccatcaacatgaactgctttgaattgacatgaacaagcttcaatcaaactataaatgctgaaatttttcaattatagaaagtatttgaaagatcccataaattcccctgtcatatcacgtgagctgcatttactgcagcagacactttttatctcgggcttggaggaaggattagcaagaagaaagtggagggggtctgaggaagggctggcagcctagaggaggacagcagcaagaagcaggctggaggcagttctgtgctgccggccttcatgggtgtggcctttggacagcaccttagcaggaatgtggtggagagcagccccattcactccagaggagagcctcaaactcttcaggcagatctagcctaggtagaatcttggcctggcccctccgggatgacaggtgccattgcccaagaatggggaaaaggctgaagtgctccagccaaagaccccaatttatcttcaggacaattttcactggaaaccttgcctcaccactgcccactttttcagaagtaattagaatgctaatctataagaaagatgactattaaaaataaattaataatagataatacattttggcttacaattttgaataatatagccatcccatcttaaagtaaaaattcatatatttttaataagcctgagacatgttttccaatgaaccacagatggttcatttttattatcctataaagagacattatgggcaagtgttttttaaaatggtaaaacagaaccttagagcagctctcttttgaagatctctaagcactttctaagcatcaggacccccttctgtcatcacagagactgaaatgaggagatggtctctgtcaccccctcactcaccagtgagccccagaccttcatccctgatcagatggaagcagtgtggcatgattacagttcatatttcaactctgccactcaatgactaatagccaagcactaataatgcagaaaatgtaaatttaaaaaataatcttcctgagattggttatgaaatgcactcaacacagcaccatccacagagaggttctttttaattgctcttttctttcctctcgacacccagaatcacaaagcatgcctgaaagcgtcacacatatatgtctgtgaccataacatggcattgcacatgcaaaggaaataaataggtgttacccatgtgacaaaggtccatgagctctgtccgcaaaaagctgttgagtttaaagaacaaataattctgaaaaatcttccaggagatgaaatttgtagaactcaagggcagtaaactagctgctttccaaggacttgtcatagctttattgacttacaatagccaaagataagtcagtattaatcaaacccattctctagaaaaacctcatcatcactggggccagggcagagaagtgtgacacagctctctccagcttccccacttcacagcatggttccaccatccacccaattgctaaagcctggatagtcttccttgtcacctcccgatccccttctctaacacccatcccccggccacccaacatcagcaagtctggtggtttctctctgtcacagagattcaagatcttcccctcatctgtctgtttcaaagttaacatcatctctcatccagacagttgcaacactctcctagcaggtccttctgcatctattttttaattaaatttttaaagataaaaacattcctctaaatagaatctgctccagaacccagattaaaaaagaacgagaagggggaaagaagattagggcatcccagaagctccctatttgccccatttgattcattactccccaaaggtaactgctatcctgacttctagcaacactggttaatttccgttgattttgcactgtatattcatccgtgctgttggacactgtcatacttgattcattcacattgctgtgtaacatttcattgtgtgactattttaacatccattttactgttgaacacttgggtaaacttctgctttgaggctattataaacttgacacttctgcttcccattgctttaaagataagagcccaagtccttgtcagacaggtgaatggtccacacagttagcatcctaggctgggcgcggtagctcacgcctgtaatcccagcactttgggaggccaaggcgggtggatcatgaggtcaggagatcgagaccatcctggccaacatgatgaaaccccgtctctactaaaaatacaaaaattagccaggtgtggtggcatgcgcctgtaatcccagctacttggaaggctgaggcaggagaattgttcgaaccagggattcgaaggttgcagtgagccgagattgcaccactacactccagcctgggacagagcaagactctgtctcaaaaaaaaaaaaaaaagccaggctttttctcatctcataatctttgcgcatgctgttccctcttcctgaaactgctttcctaccacttctcacctttatgcttcacctcgtagtgttcatagactctccttccttcctaacttaaaagaggctccttctggtttttccttcatacacttccctcactcttttccttcactgcactaaagatgatttctaattgcatagtcattgatgccagtatttgtttattgtgtcattcctgctgaacagaggatgggcctgacttatttgggaccatgttgctgatgcctggacctaagcctggcacagagtaggagctcaacaaatttgttaaatgagtggctgaatggccatactctcaaaggacccacagtctaggagagacagaagaatctttgtctttttgtcttgcagtgggatggaagctgcagggaggggtcttgtcacattgatactgtctggggaagacagaaaaacttcagtttcagaggaggtagcccttgaaacgagatttgagagagggcagcacattgtacaactccatgggcaccatgcacattgtagtccagataaacagagccccttggagatatgtgaggcatgggatagactcagagaaacccaggaaataaccccttcaggcatctgacatgcaaagatgtggaagtgtcaaccaggaagtcatgttgggggaacagcaagtatttacagaaagtgactgtgtgtgtctgtgtaggagggtgactttgtataggagagataaaacctgtgagctaatcaaggagaagatcataaaagaccttcataaagagcatggcctttttcctgcaagcagtgaggagccattgaaggctttagcataaggacagtcagatgtacttccctagaatgcacatttccttctgctccagaacttctgcacaggaggctcctaaaagctctccccatcctccctgtacacgtagaatctgcctctgtctctctttctctctcctcctcctcctccatctcctcctcctcctcctctccctctctctcgctgtctcacacacacatacacacacactccttccttcctatctagtcagattccactccttgggatttcaggcccaccgtcactcctcagggaagcctgccctgaatgcctgcactacaccagggcccctttcccctgcccccatcccagagcaccaaatagctttcccttgcagcacttctcacagctgtcattttatgtttgtgtctgtgattcttaggttaagtccctcatgcaccaaatcataagatctgggaacaaggaccacacctgtcctgttcatcactgtaatcatcacactgcctgccaaagtgccttgcacatattagatacttagtagttatgtgttccatgaatgactctttaagagatcttctagctgttcttgcaaagaacccattggtaaggttgaacctacaggctgatactttgcactagtctcaggaagagatggtgagtacatgaaattgagtcccccagaggttaatgcccagtgccccagctaggaaacgtccaaggaggcaatttgaaccccatctgtctggctgcagagcctagccctctaatgcattcaggggtcctagctcctcgaggatgccactgtgccgtgaacttctttctgaccctcatggctcccagcacagcatccacactcagaagtgcaagatgaatgtttgcagataatgaacataaagctctcaggaaccctcatctcctgagaatctgctttggcccccacagcaggtctgggtgtggaccttccccaatggccttgggaaattatcaacatctccccattagctgttgcaatattaaattgtgtgactggaaatgaatgaataatcccatgggcaagtgagggagaccaagcagcagggatttaataacaagtcctgccctttctccaagcagaaggtcttcctaattaaatattaaaaatctatccatacaagcaagagcgaaaaattgcattttcagcagtgcagctttgagatgctgcctcagaagacccaagagctgtgggaatgccctctccaggacctagaagagggggccagaaaaccgccatgtggtaagcactgccgggtacccgggtatcacaggccttgccacattcaatcctcatggggacaatgagacaggggttagatcacagccactgtctaaatgagcaaactgaggcttagagagggttagtgacttacccaaggccaccaggtatcaagtggcaaagttgggatcttaacccagttctatgtggctataaagttcatggaatagaatgctgcagttaagaacatgggctttggcatcaagcagacctgtatttgagccccacctctgctgtttattaactgtggccctgggcagatgaccttacatccttaagtctctagttctttgtctttaaaagggtggcagaatgtacctcactggttttaggaaggtcacatgagatagtgcacatgaagccctaggcatgggaaaattcttctaaaatgtcagctgccattctgatcactgcaagacccccacccccaatactcccaattgtaccaccccaccccactcaccagtgtctcagaaatgcctcctccagaaggaaggcatcctgtctaacccactgcttctagccaagctgtctttcttcagaaggtagaaaaagattgttagtcattgtttaatctttattgagtatataccgccacaccaattgcactgccattcattatctcatttaaatctgacaagagccttgtaaagtagggattattcccaccatttcccagatgttgaaactgaaattgataaacacgacatgttgccatggctacatgaagatctccaagccggaggatctccaccctcacctgcctagcttcccagacctctctgcagaaaagggactgacccccaagacagccctggcctctgggctccaccccttccacatccatcccagggccgctgaggactgaagagttctccacgtttgccctttaaagtgacttaaaaataatctttatgaatttcttcatatacaaaatttgtacttactcattgcagcaaatttagaaaatacacataagcaaaaaagaacgtaacagccatccataaccctaactctcagagatcaccactattaaaatgtttattatctaagagagagatgatatagacaaagatgagacagattgacacagagaagatgggtacatgatagatattttctgttttataacccttgctttttcttgcacttctaggaatttttctgagaactaatctgaaatctgcacagggtccccacgtctcggatcctcatcccattgcctcccaccttcttgaactttgcttcaataattatcacacctcctttgcatgtttaatcttcccccttttaatgacaactaccaagacctgtttcctagtgcagggtcatgaggtaactaaaataagaattaaattgctctgtgaaaaaaaaaaaaaaaaaaaaaagttttacagtcccaggagattttctccagccttatcatattgttgataccatagggtcagttctgaagctgagcccaactcagccctaagctttctaaaggggaattgccaggtcccctggtattccagctgaaacctcaaacatcctaaattgtaggctctattaactaataaggagaaacacacttccttccccttcccatgacttgtagggagtctagggtctcaggcctatgtcacaggccctcgattgccatgagtcagcaaggagaggaaggacacgaagccagcaggcagagagctggccccacagagccatcctccgtgaagccccagcaaacgggagggaccaagtttgtttcagttttcctaaaaataacaagactgtattttctttgctgttggctgtccctaaaactgttaacatgggttcccagcctggcacaatgtggtccatgcctgcctcccacatacctgcctcccacccctctgggccttgttcccttcatcccagcctccagacacacctgcctcctgtcatctctagagcaggcttatcttgttctcctgtgggctccttgtagaggatgttccctctgcccagaacgctctccctcactcatcacctgttggtccccttctcctccttccaggctctgtgtcaaggccaccacagagaagccttgcggttatgtttagttcttcctgcctaagttcgcatggtaacccatacctttcctccatcataatttgctcaactgtaatcaaacattatttttaaaaaatcattccagcctgggaaacagtgagaaacccatctctacaaaataaaaaataaaaattagcttggcattgtggcatctgcccgtggtccctgctactcaggaggctgagatgaaaggatcacttgagcctgggaggttggggctgtggtaagccgtgattgccccattgcactccattctaggcaacagagtgagaccctgtctcaaaaaaaatattattcatttaatatctgttgccaccacaggactgatccctctgtgagggcagagattgttcatgcatggaattgtgatttataagcactggctctggagccaggttgcctgagcacggagccagctgtgccctgcgggacacctgtggcacacttcactcctgggacacctgggacacgcacacaatagaaatgttcacattttactaggcaatgccagtcacatagtcctacctaatttcaaaagggtaaaaggtacacccaacacgcatcaggaaggaggaggaccagaaattgttggtgacaagcacaaatgaccaccccaatataatattttgtttggaaggcattttattccacaaaaacaacattacaataaacacaacaacaaaacactggttgcagtagaaccaactttccagacctatctgcacagcacaaccattatcccactcaaaatgtcatgtttttacccaaaacattaaaattttaaaagcaattcaaacccatagcttaaaaaatgttccaaccagtaataaaaggaaaagtgtgcctcctcctcccaacttccctaccccacaatcgcaagatattatccttataggcgaaaagggtttcaggatttgagatgcaggctgggaggtctgagaagacttcctatagaagacatgacttcaaactctttcttgtatgtgagatttaattttcaaagactcctctgatccaacttaagctttatggtaaatcaccttgggacttaaatgatgagaagcactgctatctcacagtgagaaattcagaagggctgggagttccaagtcagagctctgatctggaaagttccatcaaagcgtcactccaggcttagcggttgccacccaccactcgtcagactaaacagcctcagagccctgtgacctgctaatgtattcacaaactaactcagctaattaatcccagctcattcatcctctcaaactatgcaagtcttccagctggccctccggcttgctgccctggctaatggagtgttacgtggactctctgtaggttgcaccttactcgcagccaagcaaaggcactcattaagaagctgagccccagggctcccccatgagtggggaggaaactcatgagtgccttctatatgccagcgctctatctgcaggggttcttttgatagcagcagactgagagatgatgttactgtcccctttttcctgttgttggcaactgagactcagaggatggaagtgacttgctcaggtccaccacctcttcagctgtggagctgcgacaggagcctttgtttgacttcaaagctcaccatcactcctctctcactgatgctcaagtgggctatcacctcgcctttcctgagccttccttcgctatcctaaaacagcgcctcccgaaatcaccactaaagaacttattcatgtaaccaaacaccagcggttcccctaaaaacctatggaaataaaaattaaaaataaaaacagtgcctcccatgacccatgtctctccagtcccataactctgctctatttccattcacagctccatccccacctttatgtcttttgttcactgctttatccccagtgcctagaagagtgcttggcacctagtagacactcagtaagtatttgtcgaatgagttaataaggttgtgaaaagaacgttagattactggaaggattcatctgagtttaattctgctatgctgggaatccagtgtgcggccttggatgaagccagttccctccctgggccccagtagccacatctgtacatttagagggcaggagaaaagccacacgctctgtgacttatacaacttgttgcccagagtggaggctgctttgatgctcagaaaaaagaaacaaacatggaaatgctaaatgggtggcagagagcttgagggaggaaggagatggggagggtactcttgaaactgtttggtgtcttccctcctgccccctcagtaccaattgtcaagtacagaaagtgaaggagacttgtattagtggaatttggtccctgacttgttatagagacacaattacaaagacacaagagtgggcccagcagagacccttagggtggtcccttgaggttccaaagcatctgcccatcaagcagatgatgtgattagtctctgtgaccccaaggatgcctcctgaaattgctgattcaatttctcctaataaaataggaacaataattagctaataagaaatcaacaattaaagctatgagagaattaagtgagatcatgtaagcaaagtacatgtcacagtgctctgcaaataggcagtgctcagaagtgtcaccttttctctttcttctctgagcctccgtcttctcttcggtaaaatgagaataatattatgcatacctcacaggggttaagcaatgtgaaagtactctgtaaagtataaggctgaaatgtactgggctcagaacctataggtctgttccattctcgacacacgtgatattagcagcacggtacatttaaggacacggcttgattctttaatcacagggcatcctgtcttctccacattgcttgggaccccaaaaaatgaagttctgtcatgtctctagaccaccaccaaacacataaaagtcacttaggaaaacatggtaggaggcagaggaaaggaattgttgaacagggattgcagattcaggtatataaacgagtgatgatgactctaacaacagctcttggtcttagtgttggaaatgtaatagggagtagtggggactgcggtttaattgttgccgtgtgggaatgtgggcctggcatggccataatttcagatttctaaaggaaagccaaaagttcatatttttatgtgaaataaatgttgataaagttcacacttaaatgaagtgaaacagaccagggctggtggtttatacctgtaattccagtgctttaagaggccgaggcaggaggatcacttgaggccaggagttcaaggctagtctgggcaacacagtgagaccccatctctaccaaaaaaaaattaatttaaaaaataaaagaagtgaaacaacagtaccctgtgggctgccagattgtgatttctgaactaaactgtcagattacaaagttacccgctaaattagccaaatactttccagatattccctgggccactgtctcgggactcttaatatattttccaattagttccttttagtgctacatacacacttttagcaaataatgagcacttactagtcactttctatgtgcaaagcagatattagacatcacagagggagtgagataccgaaaacaaaaataaaacaaaaataagcacaagacacaatctccgcctaccccacccttgaatatgaaaactgtgacacccaaaggtagattttgatacctgctgggtgattgctagagataataagtgctttgggaatttggacagagagagcttttttttgcagtggtctgagagagctgcccagaggagatggcacttacgccatgttttaagggtggataggattagtgccagatgatcacatgctctggtagacaggggtctgtgcaccagtagattctggggctattgcagaggactcatgacagggattagtctctgtgaccccaaggatgcctcctgaaattgctgattcaatttctcctaataaaataggaacaataattagctaataagaaatcaacaattaaagctatgagagaattaagtgagatcatgtaagcaaagtacatgtcacagtgctctgcaaataggcagtgctcagaagtgtcaccttttctctttcttctctgagcctccgtcttctcttcggtaaaatgagaataatattatgcatacctcacaggggttaagcaatgtgaaagtactctgtaaagtataaggctgaaatgtactgggctcagaattggggaatcgtctggaaaggtagaccagggccctagcgtggactcttcagcgccagcaggaaaatctaggctctgtcttgaaggttcctcagcaggaaggtggggggttgttgtggggtgaatctgatggaaagggattcctcctcctcctcctgctttctccagggtgaggaatctaggcactagccctggggcccctccaggtcccactcttcacctcttgttttttatttctcctgccatacaaccttctttttatttaaaatagatttaagcaggatagagccccctcccccaccatcaaggctgtttccttgtaggtggggggatgccttcatggtaatgatgtagaccctgagacaatatagagaggcagcagggcttggaaacaggcagtatttcctctttttatgatggtttcattttacatttttattggcctttcactgattgctcccgggctctctggcaggatgtgagatgcgctgacatttatagaaatcaatacattaataaatcacgaagttcataatgtctgatttgcttctaaatgagacagaactattatcgccataaagttgcacataaaatatgcccaattgtgatgtattgtgtagtctaatcaaaggcatttgagtgaataacctttccccaaaagaaggaaacaatcaaagctgaataacttcattaataattcaaggtgtgtctgccaaggcttcatttattaagtgcacagttaagaggcttcagagctgaatcctggagaggatagcaccttgccatcttctccctgcctctgggcaggcggatatacattctcagatgaactgactgcactccttgcatctggaagttcatgttccagtggagggtaatgcccagttgacttcttcagctaagagatggcccgtaacagtgctcatggactgtccggattcttaagggcagaggagccagagccaggaaatgtccttagtggccatcagttgttatgtctgttcactaatgttccaggccctatgcttctggtgtccaccacccacagaccccctgttctgttccacggactgagatgatcaacagtctttcatccagagggttgtgtttgctggtggccattacctttaacataaaacgatcatatttactttatcctattcatgtccaacctcaactgacaattgagttgtgtctctgacaataaatagcagaaaaaggaaatcttcctatactgaagagaaacacaattaattaactagatccatcaggaaaggtacaatcatgattgagacagtgtttaacagatgtgactattggattctgttgttgagaatgacccttaaaatcacagtcaaaatatacgacaagatggaaataacatttttgagcacctactatgcatgtagagcatcttacataccttatctcacttagatttacagctgcaaggtgggtatgattctagcttgaattagtctaataaccatatacctcctaggggcagtgagatgattagatcaattctaaaactattaccatgctctctgagctcaccaagacaggcagttaatacaaggatacattaataccgaatccagcaaaagctcacatggccagcttccattatgttcctatttgtgattattctgtatcaagcacagaaatgtatgttcacacgaacaacaaagaaggggtttattagtgtggattacagggcctaagcctaccctctgaaactggttttggagtctttagcacgcttgtttgggacagttaaacatgtgccagctattctaaaacagtagcagtaatgtgatagagctgggtcataccgtgcttcccaaagtatgatcacttcatttcaacaacttcacactaacagcctgaactgggctgtgaagggaatatttagaccaaggaaactggaaaactgtatcaatcaggcttttccaccctccccaagagccagttgtcagatatctaccagcctaccaacgctagctctctaatcagaaaccatcacttagcaagttcccaaattatctgcagagcaatgaactcctcttcttcagaaagcaggctgaaagatacactgttcacatcttagcctgacctggacccagtgagtttccatcagtgagaaaattctgtgctaacttgagataatactattcttgtggcaattttacttttcctttgagcgattccttcaacctctctctgccccttcatttttccgtcttaaaactaaaagtgccctttctccctggacactcctcatttgcaatgaattgtcatttcagctcctcagtcaagaggagtaatgaaatcccacccgtgttaatcctcttatatcccgcagaaatattgtagacccactcaccctaggcaacatgccctctctcttcaacacaggtcatcaattgttcatttactggctatctccatgtactggaacttcagggtggtgtccagctgggttcaaaggagaaacagtgggaagtttctccactgccacctgaattagatgagaaagagttgtctactgaaatacactagctggtggcaggattgggacgtcatttgactaattgcctcctagagctgcagagactgctggaactacctaagtaaatcatcaaaaaaaaaaaaaaaaaaaatcatcccagggcactttttccagacaaaaaggtccacttaaaacatcctctagagatctgtgcctgaagctgagctgctgcaatgaaactgacatttctgccttgcagcctggccatgggcttagctggactaaaatgctgctgcagtggtgagggcacgtgagagtccctaatgtacatggccttgctccttgtcctgacacatcttttagggctgctgctttctctagtgctggaatctagataattcctttcccagccgtttgtttcttcaatcttggaaaatatctggatgaatgtaacactgtcacacacaaacagaattatgacttacgtcacattctatgtcgtgattttgtggacttttaataattgcattacatttgtgaccattaatttccaccatcgccctgctcctgagaatctgtaagggacatttgacactcctctccccacccacctcaacatttgtgctgacctgaaggtcacattaaaaacatacccatttggagagaaagatctgtctactgaaatacactaaatattgaagaatttccaagtcatttgatcttgaaaactccatctaatggaagcagaaacactcaaaggtttttttttttggactccctttttcaggacactttcaggactgaggtatataaatgaatgagaaatgtataaattcaatttcacttaaaaggagcaggaggggtttcaagattaagagaacaaatgcttgaagcaaaacatgatttgagttttattgaaccgagaagactgaaaaaaatacgtggaacactcagaaaatctttatcaaggctcagctgagcactcctggggctcattgttaagtttataaaactcagagctgatgagttgtgtgcactgtgtgggtctgagtgggcttatgactcccctccaagcctggctgtaagaatctaagacttaaagctgaaggaccaaatgggactttccgtcccatcccctctctgctccatgcaagcaccaacgtggatttttgcccctaattatattagggaacgctgtcaatcaaaaagatgatgttaaactcatccagaacaaaccaaaccatgtttaaggggaagaaaagattacatcttcaaatgccagcatgccatcattaatacaatgtctaatgtagtcaatatagttcaggcaacattgaaaatgaaccactgcaaatactaggaatacaatttcaagaggaagcacaacattctgtgtttctatgcacacagtcctgtaaattatttgcagctcaagtatgtcatgttcttttaaattttcccctgggtacagcttgaacaacttcctacaagtgttgatatgtcatattctcattatcatttagttcaaaattaccatgatttaattaccatgaggttgcttttttgatacatgagttacttagaaattgaattaggctaggcatggtggctcccacctataatcctagcactttggaaggccaaggcaggaggattgcttgagtttgaggccagtctaggcaatatagtgagacctcatctccacaaaaaagtacaaaaaaactagccaggcatggtgacacatgcctatagttccagctactcaagaggctgaggtgggaggattgcttgagcctgggaggcagaggttgcagtgagtggagatcacaccagtgcacttcatcctggatgacatagcgagaccctgtctcaaaaaaagaaaaaaagaaattgaactatattgcttgatttccaaatgtttttgaggattttctaattttcttttggctattgatatgttgcttaattcaactctggacaaaaacagtctataacttcaattctttaaagttttttgagattgactttatggcccaggaaatggtcacttttggtaaatattctatgtgcacttgaaaaaatttatagtattttatgattgctgagtacagagctccatacgtctcaatgagacaagtttcttaattatgttgctcagatcttctatacccctattgatttttttgtctgtttatcagctgctgaaagaggtatttttaaattactccaattatgactgtgaatttattatttttccttttaattctatcagtctttgctttatttgtattttgaagctacattattagtacatattaatttagaattgttttatcttcctagcagatgggcccttttacataagaattctctatctctagcaaagttacttgccttaacatctactttagctgatgtaaacatagctgtgccagtgtttcttgatttgtgtttgcatggtatatccttttccatcattttacttttattttctgtgcccttatgcttacaagcagcatttaatcagggtttggtttatatctgatgatttctatcttgtattgtagattttctattttttaatttttcagtggttttactctgatgttcttataagtggttttctttgtgtttatcttgcttggggtttgtagtgctccttcactctgtgacttgatatatttcactcatttttttaaaatgttcatttattagctctttaaatatcgcttcattatcattatttatctctttcttttctgagactccaattatacatatgttcaaacttttcatcgcgtctcatatgtctcttatgcaagcttatctgtgattccattctttttttttctttttttgagatggaatctcactttgttgcccagcctggagtgcagtagcacaatctcggctcactgcagcctccaccccttgggctcaagtgattctcctgcctcagcctcccaagcagctgggactacaggcgcgcaccaccatgcccagctaattttcatatttttagtagagacgggatttccccatgttggccaggttggtctcgaactcctgacctcaagtgatcccccgcctaggcctcccaaagtgctgggattacaggcatgagccactgtgcctggactgtgatttcattcttttctctcttgtgcatctgtctgtgcatttttctattgacttatctaccaagtcacttattatctcttaatctgtgtcaaacccacttttaaattggtctgtttaattgttaatttggataacatatttttcaattctacaatttttgattgactttttgtatatattctggttctctggtggaattatctagctttttgtatattttcttgaacaaatgttcaccattattttaaagcccagatatgattaatccaattatctagatcagctgtggatctattactgtattctattttttctcttagtcttgtctcttaatatgcctgacagatttttactgaagggtgcacattggaataaaaaatgtgttacctatctggttgagtcttcagcttcagaaaggtaatagagcaaaggcagataaatccaaacagggactgagctgttttcatgcaggctgccttggtagctctccaaagccttcaaaaatgatgagatttttttttaaatcctttttatccagttgttctcaagggattccacccctgcataggagagctcaccattcctgggatcttcagcttctatgcctttgcatatgctcttcccttgttccctcattcttcaacactcaactgaattatcacctcccttgaagccttctctgacatcccttctagtcccatgccacccaggaggcactaagagcttcctcccctcagctcccagttcttaaacatgtcaacactgttttgaaatgatttgccaatgaaaaattctagaccagcaaccaacaacatccttcccaaaggtgtgttatatatggtacatgctgtatgtgctaaacaccaaattcattgataacagctaagaaccaggaaacaaaccatcgttaattatggcatctcttgaaaaatctaaagatctggactcactgggcttaaatgactgcatgataacaactggttgagtaacaactgtttccctttcatggagcagttactctccagttctcagttcctaccactctctatagttgtacactcatcatctgtcctcatctgaattacctgccaatgactactggcatttgagtttctaatccatggtctatgtgtatgcctcctcaccagtgtgagaactcatgtaaacaggtattatgtcttttcatctctctcctaatacctaagacattcctggcacaccagagcatgtcaatgcttctaaacatatctatattaaaatgctaccaaagcattcagggtagtgaaactattctgcgtaatgctgtaacagtggatacatgacgtcatgcatttgtcaaaacccacagaactgtacaacacaaagcatgaactctaatgtaaactatgggctttagttaatatctacatatcaataccggttcatcaactggaacagatataccacaccagtgcaagatgtgaataataggagaaactgtgagggcggaatatacacaaactctctatattttctgtgcaatttttctgtaacctgaaacagctctaaaaataaagtatatttataaaaaataaataaatacaaatgccacctcaccagaaggatcaaaggggcaactaaatccagcaaagtaagtgtctcacgtggaatacaggtcaggaaatgagtgaaaacactccaatggatgcccacctatacgatcactttgaagagcagcaggaaaataagcctctgctgtctgggttgcagattgggggacaggagagaaactaatacacactcaagatggtggctgagctgccttacacactcgtggccaggggtgcttgcaagacaggcggaagttcaaataagagcctacagaggaaatccaggccaaccacaaaatagacccacaaaggccagcaggagagtatctagtggagctccctgggaccttggactcacccagctccactgtgccatggataattttccaggtctggtattttgtcttgtattttatattctgcataatgggggacttggccggcatccactctgccacacatcctaatgggctaaccctcttctgcaactacccttttctttttctgcatctggttactaatcaagcttaatgggggaagaaagaatcaaaaacttgtagactgtaagctccaagagaacagagaacagagctgttttattcactgacttgtacctagtagatacttcattgacagttattgggtggagtgagcaaacaaataatcctacaagatatgcagtttccaatcacaaagaagcagagagggggaatgggggcctcctgattgtggagggtatcttataagcctctcctcagtcaaacatgcgagtgtttccaaggacccatccaacattgcacatctctgccatgtgccatcccatctctgcaggctgcatgactgcatggctgagggcatgttcaatgagcccctgtgggagccatgggcactgggaggcaacccactgctcttgcctgttctgaccatgggaaaaggacagggagctcagctccagctctgctactgagaggctcttcgcatatgtcaagctggacgacgtggacaccctcagagcggcctctctccattgacaataaaagtgtgttttgcttttcgatgaatcgatttggtaaaatgttttctcactctttcctagacatcgcctggtggtattaccagtatcagagaggtaaaaaacagtttaaactaacctgactttggtcacatgacttgcaaaggcagagcttcttaatcaagctcatgttttgtaattagtcttctcatgcaccagctttctgtgtcctttgttaacaagccccacatatatagaaacagttggaaatgttcttttagagacaagttacaggaaaagctttgctccccgtaagaaatggttacgttttccttttacagacatttgtaaaaactcagagcccatttgcagctcaagtgtagtaattgcttcaaacaaatggcctggatttctgtgttctctttttctccatggtcttcacctcctaatctaatcaacatatactgaggcagtttttcttattactttatctctttttatttcatatttatttcctataatcagcttcaagtcctttgtgcaacaaagtggcatgtgtttaaataaacagtgaggagtaggctatgtggtttgtaggtgggagggtaagtaggtatagatcaaaaaccaaaaactcaatgcctattgcacagggcaagcagcataaatgaattctgtgagccaggggtgaacaacaggacatcctagaggctgtggctgcccagaggggacagccggtgttcagctctagcaggctgctgaagtgtctgaatttgagaccaaaattgtcagataatcccattttccaagacaaatcagacatccagatttgtacatggatctctcatctttaaacatggacaactaattccaaaataattaagatacattttacaggtcaaacaagacctatctttgggccacactcaagccgaggatcactattttgtaacctcaaagctagacggatggccgggtgcagtggctcatgtctgtaatctcagcactttggaaggccaaggtgggcagatcacctgaggtcagaaacttgagaccagcctggctaacgtggtgaaaacccgtttctactaaaaataaaaaaaaattagccgggcatggtggggcacacctgtaatcccagctactcaggaggctgaggcaggagaattgcttgaacccgggaggtggaggttgcagtgagccgagatcacaccattgcactccagcttgggcaacaagagcaaaaatccatcttaaaaaaaaaaaaaagctagatgggtaagtataaagtccaaatcagagacaccatgagggaggcactattggccagtccagggaggagatggtcatggtcacggtcctgagcctgacagaggggtcacctcactggcgagaagacccaaggtgtgagtcctcccactgctcacagtccaggtctaactggtacacaagcacacagcttcgtaggagcatgtgtgctgcaaggctggctacaagcgagtttgcaatttgtgcttgaggaaagcagaatccactgtggggacatgtggaaaccagatatgatgaaaggggcctggactggctggattctaggtccagatatgtcacccattgctcaacgacttaggactcagacaaagccagttagtgagaaggtttagaagagatctcctatgctagaatagcttagcattggctggatgtgtttaacagatacagaaacccactgaaagtacagtcatgctctgcataatgacgtttccatcagcaacacaacatacacaattgtggtcccataagattataacagagctaaaaaattcctattgcccagtgacttcttgaggttcctgaccctgtgtgggctcaggctaacgtgtgtggttgtgtcttcatttgtaattttaaaaaaagggttttaaaagaaaagaaatgaaaataaaaaatttttaaatagagaaaaagcttataaaataagaaaataaagaaaaatatttttgtacagctaggcagtgtgaattttaagctaagcgttatcacaaaagagtccaaaagtttgaaaaaaaaccaaatagtttgtaaaataaagttagagtaagctaaggttaatttcttattgaaaaaaaaatttattaatttagtatagccctaagcataaagtatgtataaagcctacctcatgtttagtaatatcccaggccttcacactcactcaccatcactcactgactcacccagagcaacttccagtcctgtaacttccattcatggtaagtgccctaatagttgtaccattttttattttttacaccttagttttattgtaccttctctaaatttagtatgtttggacacacaaatacttaaaatacttaccattgtgttacaattgcctacagtattcagtacaataacacactgtacaggtttatagcctaggagcaaaaggccataccatacagcctaggtgtgtagcagggctaccccatctaggtttgcgtgagtatactccacgatgttcacacgatgacaaaactgcctaacaacacatttctcagagcgtatccctgttgttaagcgacacatgactgaataagcaaatgtgcagtgattgtgcattttttttcctgagagagtctaaacccctcattccacactcagaagagtctatgatcccaaaacattaaggatcacttaatcaaaatcatctactattcaatctgagaatttcctgtgtagcatcctctagagttggtgattccatctctctttgcccctagtgataggtattcatcactgtgtgaggcactcacagttagaaaatcacttcttaatatcacatgcgcagggcaatggtcccctcactcccttcacacgtaaggttatggaacaacaggcatgagaacgctgaatggcttaaaagtactttacaaacaaaaggtgctctaatttattcttgttatgtcattattgccatagtattacatctcaagttaatttttatctcaaccattcaaacttaagtctgacttagtaactagctcatcattattttttataacaaagtaatgactagcaacatctggcatcagactttgaacaaacctcagaaggaactgtcaaggaggctccccacgggttcacgctcttctctcctcctgcacacagggaacagggccattctccttcctttactgggactacctgggcttcatccagggaatccccaggtggcaacaggagggtggtgaaaaccgctgcccgtcacctgtaaagtttcctgtgaatgtgtctacagcggccagcaccacaaggcatacaaagaaagggaagggagagctgatgtgagagcggcagcgtgggcactcctgtgaggttgccacagctgtagacaagttaaatcagtgcagttcaatcaaaagtcatgacccatgagcgtcacaaccagcacgagtctacaaaggaatacattaaaactaagaccagagcacagctcacattagtgagggatgggatcatttcatggagtttttgtttcaaaatatttcattaacatttcacttatatacatgtgtgtatactgggttgtgatttaaattacaattcttactataaaatacagcaaaagaaagaagaaacaaagagagggccactggtttacctaacatccacaggcaggctacttcccagcatcttgagccccaaagaagtaaatttccttccacaaccgatgttaccacagcctgacacttagccaatgatgaaaacgaaaaacaaaacaaaagcttggcagtcagtatccaaatatgcagatactacagaatctgtttgatgtagaagttgatcctgctacccagacagcaaacaactcatttattaataaagtccagttcctccttaatgaagtgggtttaatagttgatatctcaataattacttagtgcattttttatgaaggtgatgggaaacaagtgctgtttcttgagtcggaaagagtctctcaagctcccacaaagaaatttcccgagcttgtgaggaattcagtcacaggaagatcaaggaattaagtgtactgcaaaaaacccttcatgcttctggctaagataaatctaacagtgtactggatgtcttcaagaatacctcatttactcaaaaaatacaatattcccattttctttatttgcattttaatgtgatttttgcttcatctcctttcttcactcaagccacctgggccgtacccagggaattcctaaggggcaaaaggagggatgtgaaaacctctgcagccccttcggaagtttcttgtgaatatatgcacagataaacagatgtgcattttaaaaataaaaatgcttttagatctaatgctaggagattcaaaccaacaattaatttctctgttaaaatgggttaaaatagatgtaaaatattaatatgtatataagcattctgaattagacttatgtgaatttttctccttttctttctttctttttgagaataagccctttcatttacgtagaaatgcttcagcgtttagataattgctacttatcttgttagctacaaacacaaccataattaaaggctctgtaagaattatgaattctggggaaattggccacttgtctctgtggcgtaaacagtatctaatttataacaaatcatctgccttagtcccagcaggataaggtgatatgtattgcccagcacatgagaaagatggcaattaggaattgttaccaagttacgggagcctcacacgaacatccatcacctttggggatatgtacaagatacaaacttaatttgatggattccttttgtattgggatcaaagtctcaaaagggaaagtgacaatttcagggaaaatctggtgcaatgagaccaacactgatgagagaaatgcacacaatttaatacacctgctcacctgatgtggcaactcagcctgtgcttgctgtgggttgccacaggatgagacatggtctgtgcatattcccagcagccacccatctcatcactattcttgccagcccagatttacagttgttcaatagatggatttggtaatatctgcatgacaacaacaggcagagaaggttagatggcaattgattcttgattggtgtaagtttatagaacacattctggcagggcccaaaggaaatcactcacctacccctctgtgatggtaaaacgttgaaaattccacggacttggaccttgtgatccttcagtggaagatgggcagattccttgctttaattgacagacactttctaaataactaatgcaatcttatattacattatagtccataagggagacatacttaaactactacttacaacaactgtttttagagcctttcaaatggtttgtacaaagtagctcccatttaagatattttcctagtatttaaggctatctagtagacattacaaaacaatacgctgtaaatacattcagatttttatcagtaatacttaacatgccgtaatttgaactttctgctaaatcatgctatccattcctagttggccccaatggtgagagtttactgtttctttaaataattttgtttccctttgctgtctagaggtgtttatcattctgcttacttgcctgtgtctctggaatattcagaaggttccatgggaaacaatttgaatatgcaaagaagttatttttaaagcaaggaaaatgttttcatatggatttattttgagcacttctgcctttgcctccactgggaacatgtttctctccaacgccgaagccccctccctgtgtggtgtttgacgcagaggctgacagggcagggaagtggggttcaagataggaaggccattggcagtgtgaccccagcccacagtcctagatcccaggtcgtgacaccactcttttgacagcccagattgttacctaacaagaatgactcccaagctcaaccattccaatgccatctcctctggttccagataagattgaagatgagctggagatgaccatggtttgccatcggcccgagggactggagcagctcgaggcccagaccaacttcaccaagagggagctgcaggtcctttatcgaggcttcaaaaatgtaagacccgtgcacgctctgaaggcctggggggggttcccacgtgaggctacactctccccaatgccaagggagctcataaggcgtttcccatatgtgaggctgtacaaggaaggccagctctataaagggggcatgagagggagatcacctggctagaaaggaaggctccaggcgaggatggagcaacctcaggagacagtaaacggccaactgcccagaaatttcacagggtggcacatcctcaaggaattcaccctggcccagggtcaagccttagcccttaacataatcataccttccaacctggtggtgcccccacaataatgggatttggccctgctgacttatgctaaccaggctcaccgagactgatgtgtaagccgaatgtcggtgtattaatttaccttgggaaatggaactgacagtggaaacagacactcctctcccttcgctgggacccgctctccttggaagccacatggaagccaggttacaatcaaaagtggagtcagaggacgggagttccttgtttagttgttactttaaatacattaatgtgttcctgcagtctcaggccagtttgagagctctcagatacaatcctggatattaatttattttttaagtttaactctcagagtgcaatcttattcccaaatcctggagtggtgtggagtggggtgggctacagcgacatgcacctggtcaccctccctccaggtgcagtctgtaggtagagctgagctgggtcagttccaaactgaccacagcctcaatgttctccaaactgctgacccacagggattccagcccctcctgggagttatctgacaggtgctgggatgcctcttccttccacactagccttgactgcacatgccaagtgcccagtttcctaccattagggcttctttccttcgatggcagcattagcagtgggcagccgagttggagaaggatcctgtgggaaagttttccaggcaggcactgggctcagagggaacagcatccagaaaagagaagaaatctacactgcttggcatctaccatggactcaataccacctaacataggttcataagatacccttggggaagttattgttacccccattttacaggtaaggatattgaggatcagagactggcttggccaaagtcacaaagcttagtattggctgagccaggatttaaacccaggtttttctgatcttaaagccccaaatctctccacctcacagtgcccattctctgacaatgtctcatcattttgcaaagcagctccagtcctgagatggcactacttgggagaagtggaaatgcacaggtccctgtccctggggatcatgaggaaccccagacaccaaggctgggcccagtcttctcctagtgctggccctcaaatgcctcccgctgactctctccccttcccacaggagtgccccagtggtgtggtcaacgaagacacattcaagcagatctatgctcagtttttccctcatggaggtgagtctgaccttgaaatctatcttgcccagctccctctctggtaagcagccttcccttcctccaagtcctctcttccttgccatttgcttccttctcgaggaagagacaaactcagggcaggacacctccctcatcgtgagaggtgggagtctccaaagctttagcaggaaagaactctgaaaatgaacccaccctggaaggggaagaagggctgataatgcaacatcacaacgtctcagaacagctctagaaagcaggtattataatcccagatggagtaactgagtttcggggaagataagcagtgtactcaagattgcacagctggtgagtagcaaaccaggattagattccataagggtctgaaacaggttttgccatgctggcaccaccattgtgcagggcacttttgaatcttttccttaaaatagctgagacaagctggaattttgtaaaagaacttcagtaaataccgaagactataaaaataaactaattgaaaaagaggcaggaaacataaagttgtgcttattaagccagtttacaagtgtgccaggcccacaacagctgctctgttgccctgcccgactcctgtgggaaccagctgtgtccccatgggcctgggaccacatcggtgactcctcctgtggcctccatgtgtcacatgccactttgcatcctgtcaccaagagctgtctcctgcaagacatcttccctggatcctgacaaaatgcaaatccaagtattccaaacacttcttgggccctgtttctcatgggcctttttggcagcagacagatgccttccttggtgtgtggggcccctacccagatcaggtgggggaggcagttttgtcccatgcaggccccagaattgcagtttgctgagttccactgagccactgtttattgagttctcactgtatgccaggcacagctgtagtttaaaatactttttaaaaaatttcaagagataggtcttgctacatcccattgtagagaggtaggaaagggaagctcagagaggtcgtgcttgatgcccacagtcacatagcttatgtagtacagcggcatccaagttcaggtctctctactctggagtgagtgctcatcccaggcattcatggccgttcagaagaacattgtcatgcagtcactgtgccattcatacaccaacgactccatgcatagacaggcaggagaatggttttctcatgatggctagagggaggggcaagggctcatctcactttttgctagatctaacttcacacccaaacccaaagagttgagtcaatgggccccactccataattttctcctttccatcaccctagcatcactctcctctctttcttgtcgaagccctgccttgtttggaaggttctccctgtgtggaattcctgcccccatcacctgccctccttttctgccttgtagatgccagcacgtatgcccattacctcttcaatgccttcgacaccactcagacaggctccgtgaagttcgaggtacgctcatctggggtccactctaggggtcctctggttctgcatcacctccccctctaaatctcaaggcattgggggaaggtctggaccatcaaaagctctcagtcagaccaaagacatgtttatccatttgtaagcatttcctaaagatggggaaaagcagcagcaactttccctggcctgcaggaactcagggactcaggggactaataacaacagtgtatgagcttccgggcacactgcttcccagtggcagcccctgtacttagggctttgtatgtattaattcatttactccaattcccacaataaccctatagggtagggttttattattgattacctttttacagaagaggagagtaaggcaaagagagatagagtagttttcccaaggtcaaagagcacataaatgataaaggatggatttgaatgtaggcagaatgaccctcaatacagactgttcctacagtccacgtcctcagccactagaccatacggccactgggatgatagacagaccactgcagccatggataaggcaaaaacagggctggctgtgttgatctgtgtctctcagagctccattcttcctcaagggggcaccttgcaaaaaaaaacaaaaaaatggggcagggtagggaactgaaggcaggagctcttcacagagcatagccacatcctccaggcagacaagaggacgcaggaggcaccattctgtgagagtatcacagtctgacccaaagacacagcttcacactgtctgatggcttgatggttaatgtcactctgccttttccccttctcaggactttgtaaccgctctgtcgattttattgagaggaactgtccacgagaaactaaggtggacatttaatttgtatgacatcaacaaggacggatacataaacaaagaggtaagtgagctggggccaggggtgtgagagggctccagtgaaggtaactaacccaacagaaaacagccccaggcatgaggatagcactgtctgaatgaggcaggctctgctttggggctaacagagctggtccctggcaaaataaagaaggcctccctcattgccctaccctgccctgttcccaagcgcccagaaaggattaaacagattcattctcactgggtcacctagattcagtagatattacacagtggataaaaatgacttgtttcagtgtgaagagttactcttccctagggaacctgcatttgggaaggttaggagccacaagtcaaagctaaaagttgaaatggtggaattgtaggcagcacctagaatagaaaagaaagatttttaaggaagaggaacctacaattgggtcatattggccttaaactattttgcctattaatacaaccgccaagggggtaatggaaggtacagctgtctttacagaaattatcacaaataatttctgaatcttcactgctttgcacttttagaacctcagaggacatgtctctagccagtgaaataccctcaggtctatctcaaaactcactttggtatccactgtatcctggtatctcagtggaagctggaaattggcatcctgtaacactccacttgctgagctcctgtgtgccaggcacggtgcctggaggtatagatatcagcaccaatcttcacctcaacccggcaagcttctctctgtaagctcagagagtttatccaactttcattcctcattcatttagtcatgtttttaattaacacagatttgaaggcttattaggtgttctaggtgctggaggtaaagaggtgaacaatcagactaggccccacactggagcagcatagagagatggacaataaacaggccaaaaaggaatcagcaggtagaagatattttggcagggaaggttagcaaaggcctctccaaggaggtgtcgtcatactggaaccagttatacaaaaagccaggaaaagtgttccaggcagaaggaacagccactagagaggctttgaggcaagatagagcttcatgtgtttcaaaaacagaaaggcttcagatggctgcagatgaaggtatgaagctgaagactagtgcaggatgagcctgacaggtcagcagagtcagatggtggagggctagggtaaggggcccatccatattcccctgggaagctcttagatgaacatgttttttgaaagacacaaaaggcaaaaacagacttaaaaagaatcagaaaatctgactagctctgtattatttagagaaattatattcacagttaaaaaccattcccaaataaaattataggcccagatggtggactggtgaattctaatatcaatcctacaaaaaaattttagaaaatagaggaggatggaacatttcccagcttgttttataagtccaatagtaccctgatacccaaaccaaagaaaaaaaggtcttatgaaaggaaacaactacaaaacagtctccctcgtgagcacagataaaaaagctttcactaaatattagcaaattgaattcagcaatatataaaaaggatgatacaatacaactatgtgagttttattctaggaaggcaaggttggtttaacattcaaaaaccaatcaatataattcactatatttaaagaaaccaaagggatatagactggaaaggaagaattaacactgtctttatttgtacatggtataattgtattaatagaaaaccctaagagtctacaaataaactgctaaaaataataagtgaatttaacaaagtgaagacatgagttctatttacaaaaatcatttataattctacatccaacaagcaaccagaaaattaaattaagaaaaatagcatcaaaaagcacaaaatactttgagaaaaattcaacaaaacaggtgcaagactcatacactgaaaactataaaatattgctgaaataaagtaaagaactaaataaacacagagataaatcatgctcatgggttggaaggcccaatatagttaagatgtggattctccaaatttgatttatagatttagtgtgatctcaatcaaaatcccagcaggtattttgtagcagttgatatgggaatgcaaaaaacctaaaataaccaaaacatctgaaaaagaacaaagttgaaggactaaacctaccttacttcaagacttaatgaaaatgtgcagtagtcaagatggtagggaattggcataaggatagacatatagatcaatggatcaaaatagagagtcaaaaaaactaaaagtagagctaccatatgatccaacaatcccactgctggctatataccccatgtaaaggaaaccagtatatcaaagagatatctgcactcccatgttttttgcagatctgttcataatagccaagatttggaagcaacctaagtgtccatcaacagatgaatggataaagaaaatctggtacttatacacaatggagtacttctgccataaaatagaatgagatttaatcatctacaacgtggatggaattggaggtcattacattaagtgaaatgaaccaggcacagaaagacaaacatcccatgttctctcttatttgttggatctaaaaatcaaaacaatatgaagatagagggcagaaggacggttaccagaggctgggaaggatagtaggggggctgtgggggaagttaggatagtcaatgggtacaaaaaaaatagaatgaatgaataaggcctggtatttggtagcacaacaaggtgactgtagtcaataatttaattgaacattttaactaaaagagtgtaattggtttgtttgtaacacaaaggataaatgcttgaagggatggatacccatttttcatgatgtggttattacacattgtatgcctgtatcaaaacttgtcatgtaccccataaatatatacacctactatgtgcccacaaaaattaaaaataaaaaataaatattttttaaaaatagagatagacccacccatatgtcaatgcaacagatgccaaaaagatcaaaggggaaagaaccgtgttttcacagctgtatatccatttggaaacaaaaatggacattaaccttaacctcatgccaaacataaacatcaacttggaatggattatagacttaaatattaaaacaaaagctgttttcttaaggaatacataggagaaacattcttacaactttggagtaggaaaggataaggaatcatttcttaaagtagataaatttgactttatcaaagttaaaaattttgtgctttagaagacacctttaagaaaatggaaatgcaagccatggacttggaaaaaatgtttgcaaattatataccagatatataaagataccaggataccaaaccaatataaagactggcatccaaaatatataagggacatttataatttaatacaaagataaacaacttcatataaaataggcaaaagatttgatgagatatttaagaaaagaagatatatgaatggccagtaaacccatgaaaggttgctctatatcactggtcttcaaagaaatgcaaattataactataatgaaatacaattgcacagaatggccacaattaaaaagactgataataccaagcattggcaaagatgtggagcaatagaaactctcatagatagctggcagaaatgtaaatggtacaaacacgttgggaaacattttggcatctttgataaagctcagcacacacttaacatacaacccagaaatcccattccagtcaggcatggtggcttacgcctataatcccagtactttgggaggctgaggcaggcggatcacttgagctcaggtgttcaagaccagactgggcaacatggcgagacactgtctctactaaaaatacaaaaaaaaaaaaaaaaaaagccagacatggtggtaagcacctgtggtcccagctactagggaggctgaggtgggagaattgcttaaccctggggagtggaggttgcagtgagctgagattgcaccactgcactccagcctgggtgacagagcaagaccctgtctcaaaaaaagaaaaaaagaagaagaaaagaagtcccactcctggatatttacccccaaaagaaaaatatgtaattccataaagacttgtacaaagatgttcatagcagctttattcatagtaatctcaaaacttaaatgacccaaatgtctgtcaacaggacaatgggtaaatacatcatagtctgttcatccaatggaatattactcagcagtaaaaaggaatgttatagttgcatgcagcaatgtgtatgaagctcataaacctcatgctgagtaaatgaagccagacgcaaatgagtttacactgttttactccatttacatgagattttagaaaatacaaactaatctatagtaacagaaattagatctgtggttgcctggtgtcaaagcttgagaggcactcactgcgaagaagtgtgaagggatgtcttttggttgtgaaaatgttctatatcttgagtgtggtggaggttacatgggtggatacatttgtcaacattcatcaaacagtacacttaaaatgggtgaatttgttataagtaaattatgctccaataaatttgatttatttgttgaaaaacttggtgtaagggggaagtgcctaaccaatagaagacactcaaaaaatgtgttgaaggaaaaaaatcctgtgaaataaagcaggtaagagaaaataagaactcaatatcatccaaaatatagattacaaatcctaaatgagataataggaaattaatcccagtgctctgtttaaaggctcatacctgtaatcccaacactttgggagactgaggcaggaggatgggttgagcccaggagttcaagaccagcctggtcaacatagggagagcctgtctcttcaaaacaaaaatttaaaaattacctgggtgtagtggcacgtgcctgtgctcccagctactccagaggctgaggcaggaggatagcttgagcccaggagttcaagcctgccctgagccataatcactgcaccacactccagcctgggcaacagaacaagacccttcctcaaaaaagcaataaaataaaataaagaaatgcacatgactaacatagggtttattccaggaatgcaggaatagcccagtagcagagaaagcctattaaataatttatcacattaatatatcaaaagatcaaaccatttgatgctaaaatcacatttgatataatttaccatttattcataataattttcaggattcaattaattaggaataaaatacttcttcagcataatagaaaataccccagcctggtacacagcttcatactttatggtaacacgcggagattctcactgaagaaaagatgaggcaagaaaagatgatgaagaaaagatgaggcaagaaaagatgatgtctgcacactgtcagacatcaccactgtttaacatttcctgaaagctcttcaaacacagtgaaacagaaaaggaaatgcgatctaaataggaaaaattacaacattccttgttaatgacatgattttctatctgagaaaaaagacagcaagaaaatcaacttaaaacaactagaacttttaaaaagctggcaaagtgactggtaataaaatacatatgcaaaaagaaattgtgtagccaatatatcagttgtgactagctagaaaattgtaatacaaatattctcattgtgatcacaataaaatttaaagcacatgggcatttttaaatatccataatttagatgaagagaaagaaaattttgataagtagagaaacataccatcttctgaaaggatgtatattataaagatagcaatattataatgacagcaattcttctctaattaaatttattttattttgaatcaaaatggaagtgttatttgggaaggaaatttggcacaattgttataaagttacattggaagattaatcagatgaaaatagcaaagataattttcaaaaagaagaaaaatggtgggatttgttctaccagatactgaaatatattataaagctgaaactattaaaatattataatatcagagaaggaacaggtagatcaatggaacaaaatagaaatcccaggtacaaataccatcttggttcataataaagggagcatattgaatagagaggtaatgaatcattaaatgattcttggaaaactggttaactattttggcaataagtaagtaaatattcttactcggtaccataaacacaaaatcactatagatatgtacagttgctttttaactaaaaaagaactaaaaatcatatgtgaatatctgatcaaagaatggaaaaagcataaaatcaaagttagaaacaattttttaaattattgatggctttacactgtaaatattttaaaattctgcatatcaaaaaataccataaacaaagttgaaaagtaagtgacaaacttgtttttaaaaatctgcaatttatgatgacagaaaggattgatattcctcagtagacattcatcttaacaaaggcaagagtcatattcatcgtgcttatctttgtatttctttgacacaatatctagcacatggtagatgcgtaaaaatacctttaaataaattaaaaatctattaagatattttaacaatttaataaatctacacgaatatataaagagctctcacaatccagtcagaaataggtgaacacaatgagcaaagcagatgaaaaaatagttcatgggaaaataaataaaaatagtcaatacatatattagagacctcactaagaaagtaatgtatatctttaaaaacaatgaattatcacttatctattaaattgcaaaggttttgtaaagtctttgttgaaggttggtggaaagtggtttttcatacatagttgctgaaagtgttctgataataaactttctaaaaggtatttgaggaatatgtatcaaaagcattgaaagttatgcatcccattctccttataaaaccacaccttggtatatgtcccaaggaaataaagaatagacacaaagacttaaaagcaagaagagtcttcaggtaatagtgccccagaatgtgatagccatgatatccactaacagcagatttgtaaaatgaattacagtaaatacatataatggaatagccagtggccacttaaaatcatgaaagagtaatataaaataaacattagtatgatatattaaatttttaaatatattacattttaaattgataaagtggtatgtatgatatctcaattttataaacaactaaatgcttatatacacatgcaaatatatgatactctaaaatattcaaatactaccttgcaaaacatataaagaaaaaaatacagaaataggatttagttggtcttcaactttggttcactcattattccatcactgaataaacttactagtgcctactccctttttgtaatttgcaaactaggcagaattctccccattaatctatcagacctctctggagggcagagttaataaagtaccccttaaaagaaaaagaaagtgtggataagtagcttctcagaaaagatagcaggatcttcccctggcaatcatttggagataacctcatccaagttgtaggctatgaaaatcctgagagagcaacaaaattgctctttctgtgattaaaaaaaaatatcagacaggaaaagcatcaatggccatgtagatgtgaagggcttgtaaagcacacatttaaaaataaacacatggatagagacatctatttcctcgttctatctgttgagggcacctcagagcaatgacatccctgtagcagtgagcatactagtacctagactttgatttctaaataccattcttcgataaacagaaccagtcttcttgaagaatagttgattctaagattgggaaagagaaaatacaagatgagcctggagtactttattatgctgaaggtataaaagtgcttaaaaaaaaaaaactgcaggagtcaacctgaaggagttcccaatagtcagaatgaaagcaatttgagcaaaattaaaaattattaagtactggattataacctgtaaaatatggtaaatgcccacaagtccatgctaatgtaaataaacaactgaatacataaataaatgcaggagagaaggtagctcttccttacagaagaattgtaattaataagtatagaaggaataaaggaaatacaaaattaccatcaggcaaacactacagtaataatttttgcaggcaagatccactgaaagatactaaatcagtaaggaaacttgacagacaccaccttaatcaagtgatcaaggttaacattatcagtaataagacatctcaacactatgtaactccctgatatgacgcactgagaaggttataccatcacttctgtggtattcttgccagaaatgcataacttcaatctaatcataactaaaccagggattaactcaaattgagagacattctacaaaacaactgacctgtactcatatcaaaagtgtgaggtcctgaaagacaaggaaacaaagaaactcaggctgggcatggtggctcatgcctataatcccagcactttgggaggcagaggcaggaagatcacttgagtccaagagtttgagaccagcctgggcaacatggcaaaaccccatctctacaaaaaattagccaggtgtggtggcacttgcctgtagtcccagctacttgagaggctgaggcgggaggatcacttgaacccgggaggtcgaggctgcagtgacggggattgtgccactgcactccagcctgggtgacagagcaagaacctgtctcaaaaaaaaaaaaaaagaaaaaagaaaaaaagaatgagaaactcatacagattagaagagactaaggagacacaacaaataaatgcaatgtagaatcattgaagggaaaaaaatattagttgaaaagctgagatcccgccactgcactccagcctgggccacagagcgagactccgtctcaaaaaaaaaaaaaaaaaaaaaaaaaaaaaagaaaagctgataaaatttgaataagccctgtagtttagttaataatagtgaagccatgttaatttcctgggtttggtcattgtgctctggttatgcaagttgttaacattagaggagactgagtgaaaggtatgcatgaactctctgtactaattttgtaaattttctgtaagtctaaaattattcataatatgcaaaaattaaacaaaaaataaaataaaataagcacatggaatgagactgtcccctgggtctctgtagaaaccaggtcaaacatcccaaatgctcttttacccccattctgagttgggccagaatggtcagaataatggttcccaatgtaccttgataaacacggaaactctcaggaccgagtcctaaggttctctgattcaataggtttggagtggacttgagaactgatctttttaataagggcctcagtctgtggaactattggcctcatgtgccctgtggataatcttggctgttggttcatttttcttaactgaaaacagtggcagaaactatggggatttttaaatctctaggctagaacattaactttttaaaaattcagaatagtattttatttgcctcaagcctgtgaatggggatcccacaaatcaccccccactgaagacaatgcccataacaaggtaacctacccatgagcttctgagggatttaggaattgtctaccatctcctctctaagaagggctcccacaatatatccccttctgcttgcttctaactccctatcacctgctaaagaaggacctcaccttttaatcactttcattgccaaggggcacaaggagccccaaactctgtcacctaggaagagcttgacctcatggtttccacactgtgtgcttttatgtccctgctccaggagatgatggacattgtcaaagccatctatgacatgatggggaaatacacatatcctgtgctcaaagaggacactccaaggcagcatgtggacgtcttcttccaggtaagtgcacacaccctgcacatgagctgtaagcccagcctagatcaagtcaacccacgagcatctgagcaaatgatttgtgtccaaccctgtactaagcatggttggtaacagaaaagaattataagatacattgtcctcaagaaacagatgatctccttaagctgcaagtgtacatgacagaagagaacaagaaagtatattattaaacgctagtggtatagtatgaactctaaatccataaaaatttggggatcagggtaaacacgaaagacttcattaattacaactgtggaggtgttaagcatttgtgtctgggaagtaaggggaaataagattggaaactaggatagggccagattatgagacctttaaatggaagagtttggccttgctctggtacaggatgggcagctagtgctgatccttgactaagggagtggtataatcattggggcattttaggaaaaaattaatctagcggtggagtatcagagaatatcaagagttcactctagttcaacctcccactttgcagatgggaaaagagagtcctctctggccttgtgcaagtttgtacagcaagtaacaggccagaatcagaacctcttttgcccagtgttctgccagatggacagggtagcagggagtctacagaagaagcagaataagccagcagtgaggtgatgagtgtccagagcaagtcttttgatttaaggaagctcatggggctcaaagtgttgtaatcaggacctaattggagttgtctggccagtgaaagacaactctcattctcagggcaaagttggttaatgaaatgaatgaaatgagctccagctcgttactctgagctccagcaagaaagcaggggagtaagctttggaatggagatcaccagattctgtaaagtgctttctgttatgtctttcagaaaatggacaaaaataaagatggcatcgtaactttagatgaatttcttgaatcatgtcaggaggtaaggagagatctcagggcacaataactctacatctgggaaaggaaacctggggcctggggacctgcagaaggaaggtgatgagaaacctgcacatacctgcaacccctcccatcagagccaacaacaccagcaacaactgtgaagtccacagttccactcctcaacctgacctgcagttggtcttggctaagcacaagactgaacagagagcctaagtaggggtctgggggcatgtgaaaactcagagggggtctctgtgaaaatagacttcccgagagggcaacaccattattttttagcctgcctctggcttgatgacccatttcccagactacaaggaagcagctggggggaaaaaaacctacaattgtgtgattctcaaaccacagtgtgcataaaaattgcctggaatgattctgaaaatgcatatttccaggcctcaatcccagagactctagatctgggtcactttaacacaaatgtcctggaccaatgcttctaacactttaatgtgtgaaacaatatccttgatgattttgttaaaatgcagattctaattccataggtctggggtagggcctgagatgttacttttctcacattctccccagtcacactggtgatgctgatcctgggaacacaactttcattaagtctaaccaatagaccagccccagagtccaccagagactgaactggaaataattgcttcatctacttttgagaaatccatttgtacccccacattattttagaaatgttcagagttactctgagctccagccaagaagaatagcaaatgtaagaaagccggggagaagttcctagcagatactgagcccccatcaagtttcaagcacatacataaacatcacagccaccctgttatgtagatgtcctatgtgcagggtgatatccaagatatttaacaactagaatggaatgaacactgacccccttgggggtgagttctcactgttaattcccttgagagctggttgtaaaacagcctggcaccttccccacctccaaccttgattcctctcccaccatgggatctctgcacacccagcttcccttcacattccactgtgagtggaagcagcctgaaaccctcaccagatgcagatgcccagctgaactttccagctgccagaataatgagccaaataagcctatactgacattaaccttttcatttctgatattgataatttgaaaagcagtcttaataagcatttatctactttattgatttttttgaaagagagcgctttggggggttttcttactgtatgtctctattgcatgttctgtattttacatttttctattatttcttctctgaggtatagtattgaatgtagaaaaatcctcaaatgttcggtattaagcaatacacttctaattcatggttcagagaagaaaatatctcgaataaaaataaaataaaaatatgacttatcaaaatttgtaggatctaaagcagtattccaggaatgcaaggttggtttaacattcaataattggtcagtgtaattaatcacattaatagaataaaaagagaaaaaatataatcatttcagtggatgtaattgttcagagcttcttaaaagaagcaactcactattttactagatgatttgtttcttctgaattcctctttaaggctacaggtggtgcttcttactttgaactgatcactttctaggtccccacccttacttcttgtttttcatacccttgtagagttttctccatataggaaacccatgcttgacatttgctcaccagagttacagagctctcagggaggagactcagagttctaaccctcttgccctccttttttcccaggacgacaacatcatgaggtctctccagctgtttcaaaatgtcatgtaactggtgacactcagccattcagctctcagagacattgtactaaacaaccaccttaacaccctgatctgcccttgttctgattttacacaccaactcttggsdn

SEQ ID NO: 2 - protein, 216 aa, Unknown
  Artificial
MGAVMGTFSSLQTKQRRPSKDKIEDELEMTMVCHRPEGLEQLEAQTNFTKRELQVLYRGFKNECPSGVVNEDTFKQIYAQFFPHGDASTYAHYLFNAFDTTQTGSVKFEDFVTALSILLRGTVHEKLRWTFNLYDINKDGYINKEEMMDIVKAIYDMMGKYTYPVLKEDTPRQHVDVFFQKMDKNKDGIVTLDEFLESCQEDDNIMRSLQLFQNVM

SEQ ID NO: 3 - DNA, 648 bp, Homo sapiens
atgggggccgtcatgggcaccttctcatctctgcaaaccaaacaaaggcgaccctcgaaagataagattgaagatgagctggagatgaccatggtttgccatcggcccgagggactggagcagctcgaggcccagaccaacttcaccaagagggagctgcaggtcctttatcgaggcttcaaaaatgagtgccccagtggtgtggtcaacgaagacacattcaagcagatctatgctcagtttttccctcatggagatgccagcacgtatgcccattacctcttcaatgccttcgacaccactcagacaggctccgtgaagttcgaggactttgtaaccgctctgtcgattttattgagaggaactgtccacgagaaactaaggtggacatttaatttgtatgacatcaacaaggacggatacataaacaaagaggagatgatggacattgtcaaagccatctatgacatgatggggaaatacacatatcctgtgctcaaagaggacactccaaggcagcatgtggacgtcttcttccagaaaatggacaaaaataaagatggcatcgtaactttagatgaatttcttgaatcatgtcaggaggacgacaacatcatgaggtctctccagctgtttcaaaatgtcatg

SEQ ID NO: 4 - DNA, 214 bp, Homo sapiens
ggcttcaggggtgcatccgtcactcagggttcattcacccaggcaggctccaagttcctggggtgcacaaggtgggcactgtcccttctgggtgctgacagcagagcctggctcccctccgccaccatgagcggctgctccaaaagatgcaagcttgggttcgtgaaatttgcccagaccatctttaagctcatcactgggaccctcagcaaag

SEQ ID NO: 5 - DNA, 107 bp, Homo sapiens
actcagcatcatcaagactggagggacagagcatttgaatcatcagacgctgggccagacgtcaccccacgcgttttctcattttatcgtcctaagaagcccagaag

SEQ ID NO: 6 - DNA, 72 bp, Homo sapiens
cctgaatgcaatttgcaatgaggagatgatttgattttcttcagccctagacctccagcttcctgagagcag

SEQ ID NO: 7 - DNA, 91 bp, Homo sapiens
gggttccccaggagaccacgacagaggcctggaacccaagttctaatcccacatcctggctgggcaacttcaggcaaatttctaacacaag

SEQ ID NO: 8 - DNA, 108 bp, Homo sapiens
ggtaggggaggggccgggcccggggtcccaactcgcactcaagtcttcgctgccatgggggccgtcatgggcaccttctcatctctgcaaaccaaacaaaggcgaccc

SEQ ID NO: 9 - DNA, 33 bp, Homo sapiens
acatcgcctggtggtattaccagtatcagagag

SEQ ID NO: 10 - DNA, 809 bp, Homo sapiens
ataagattgaagatgagctggagatgaccatggtttgccatcggcccgagggactggagcagctcgaggcccagaccaacttcaccaagagggagctgcaggtcctttatcgaggcttcaaaaatgagtgccccagtggtgtggtcaacgaagacacattcaagcagatctatgctcagtttttccctcatggagatgccagcacgtatgcccattacctcttcaatgccttcgacaccactcagacaggctccgtgaagttcgaggactttgtaaccgctctgtcgattttattgagaggaactgtccacgagaaactaaggtggacatttaatttgtatgacatcaacaaggacggatacataaacaaagaggagatgatggacattgtcaaagccatctatgacatgatggggaaatacacatatcctgtgctcaaagaggacactccaaggcagcatgtggacgtcttcttccagaaaatggacaaaaataaagatggcatcgtaactttagatgaatttcttgaatcatgtcaggaggacgacaacatcatgaggtctctccagctgtttcaaaatgtcatgtaactggtgacactcagccattcagctctcagagacattgtactaaacaaccaccttaacaccctgatctgcccttgttctgattttacacaccaactcttgggacagaaacaccttttacactttggaagaattctctgctgaagactttctatggaacccagcatcatgtggctcagtctctgattgccaactcttccyctttcttcttcttgagagaga

SEQ ID NO: 11 - protein, 225 aa, Unknown
  Artificial
MSGCSKRCKLGFVKFAQTIFKLITGTLSKDKIEDELEMTMVCHRPEGLEQLEAQTNFTKRELQVLYRGFKNECPSGVVNEDTFKQIYAQFFPHGDASTYAHYLFNAFDTTQTGSVKFEDFVTALSILLRGTVHEKLRWTFNLYDINKDGYINKEEMMDIVKAIYDMMGKYTYPVLKEDTPRQHVDVFFQKMDKNKDGIVTLDEFLESCQEDDNIMRSLQLFQNVM

SEQ ID NO: 12 - protein, 227 aa, Unknown
  Artificial
MGAVMGTFSSLQTKQRRPSKDIAWWYYQYQRDKIEDELEMTMVCHRPEGLEQLEAQTNFTKRELQVLYRGFKNECPSGVVNEDTFKQIYAQFFPHGDASTYAHYLFNAFDTTQTGSVKFEDFVTALSILLRGTVHEKLRWTFNLYDINKDGYINKEEMMDIVKAIYDMMGKYTYPVLKEDTPRQHVDVFFQKMDKNKDGIVTLDEFLESCQEDDNIMRSLQLFQNVM

SEQ ID NO: 13 - protein, 186 aa, Unknown [sequence omitted]

SEQ ID NO: 14 - DNA, 173 bp, Homo sapiens
tcctcagaacaggtgcaacacagtgtgttttgctggggaaaagggatgtcaagcaatctatgacgggggtgcagggagtctggggagaaacacaaggaagtgtgtgtgtgtgtgtgtgtgtgtgtgtgtgaatgtgtgtgtgtgtgagagagagagctggtgtttgtgttcca

SEQ ID NO: 15 - DNA, 333 bp, Homo sapiens
  misc_feature 88, 164: n = A,T,C or G
ggaatgtgccaagacattctttagggttggtaaccagagacgctattttgtccttggtggctaagaaatcacttttctgactgaaggnccatttgacttacttcttttaaattcaggggaatgggtgggcatctccatgattcaggtaaggaaaaatccaaggnaaataaacacacacacacacacacacacacacacacacacacggagtagaaatttttagtgcaattttttgtctcacagcattaattaattgcagggatataactaccttggcagaattttttctccccaacccaccaccccccggaataagtttggctcttttcagct

SEQ ID NO: 16 - DNA, 166 bp, Homo sapiens
tgcccactcataagatgctgaggttacaactgttaataagatattaagatactgtctttttcttcctctttctctcttacacacacacacacacacacacacacacactttttgggccaactggaaattcatacattctccccagcactggagctcaaagcgtctg

SEQ ID NO: 17 - DNA, 333 bp, Homo sapiens; identical to SEQ ID NO: 15
  misc_feature 88, 164: n = A,T,C or G

SEQ ID NO: 18 - DNA, 166 bp, Homo sapiens; identical to SEQ ID NO: 16

SEQ ID NO: 19 - DNA, 360 bp, Homo sapiens
ttgttgttgttggtggtggtggggtgtgtgtgtgtgtgtgtgtgtgtgtgtgtgtgtgtgttcgagacagactctcactctgtcacccaggctggagtgcagtggcacgatctgggttcactgcaacctctacttcctcagctccaaggatcctctcacctccacctcccaagtagctgggactacaggtacgcgccaccatgtctggctaatttttttgtattggagagacagggttccaccatgttgcccgggctagtgttgcactcctgagctcaggtgatccacccacctcaacgtccccaagtgctgggattagaggcgtgagccaccacgtctggcctatacactatagagttt

SEQ ID NO: 20 - DNA, 212 bp, Homo sapiens
tctggacaggaccaggagttggctgctgtcagcctttgccccacctctctgtggctactgggtatgtgaatctctcaaggcctgaagagaggacagctgaggaatttggaaatcctaaaacacatgcatacacacacacacacacacacacacacacacacacacacacttttctttcccttaaaaaaaaaaagattcattcaccgtgtgca

SEQ ID NO: 21 - DNA, 347 bp, Homo sapiens
ctgtctacactacccacccattagtcacttattagccctctgaattactggattgaaaaaacatagtatatatatagggcttggtactattcacggtttcaggcatccactgaggggtgttgcaatgtatctcccacggataaggaaggactggtatattaacacttttatttgatttacaaaataaaggatagtttatatagttctgggtaaaattaattaattaatttaaaaggaaaaaagataaaggcaaactttaagcttgttaaaaattaagtaaaataatttggattatttaattggacaaagaggactggctttgccaatgaaacaatatggccgacatg

SEQ ID NO: 22 - DNA, 195 bp, Homo sapiens
ggaccttctttctgccctaaaaccgcaatatcattataataacaaatatatatatatatatatatatattttttttttttaaaacaatcttgctatgttgcctaggctggtgtggaactcctggcctcaagtgatcctcccacctcggcctcccagagtgctgggattatagacatgaactaccatacccagcca

SEQ ID NO: 23 - DNA, 308 bp, Homo sapiens
cacagccatcaagtttccaacttactgcctcacatattaagatgatttttttaaacaaacttaacaggcgatggatactccattctccatgatgtgcttaattcacatgcatgcttgtatcaaaacatctcacatactccataaagcctgtaatcccaacactttgggatgccaaggtgggtggatcacttgagcccaggagtttgagaacagcctggacaacatggcgaaaccccatttacacacacacacacacacacacacacacacaccacacaaacaaaatgaaacaaacacctaaccaacaa

SEQ ID NO: 24 - DNA, 305 bp, Homo sapiens
tcctaacggctgctaccactaaagatcttagcatggtgtgtgtgtgcgtgtgtgtgtgtgtgtgtgtgtgtgtgtgtgtgtggtggggctattcagtaaggctagaagtgaaaaagctagtagaaagcccatggtgatggagaatggaggaagactgattagggagctcctcagcagtataaggaaggactaagagcacataaggacaggatcatagaattccgcatctcaggatttttgaggctgccactgccttagctgtgaggccagtgcatataagaatagtttgcacagttctgctgtgg

SEQ ID NO: 25 - DNA, 370 bp, Homo sapiens
cctctgggattagcctctcagggtacagatataacgatgattgagttggcttatgtatgtgtgtgttgtgtgtgtgtctgtgtgtgtgtgtgagagagagagagagagagagagagagagtgacagagagagaatgagagagaactggaagttgtcaacaagaagagtcaaactctgtaaaatatttgaagagatttattctgagccaaataggagtgccacagccccgggagatcctaagaacatgtgcccagagtagtcaagctatagtttggttttatacattttagggagacataagacatcagtcaatacatgtaagatgcacattgatacactggtttagtagggaaaggtgggacaactcgaa

SEQ ID NO: 26 - DNA, 251 bp, Homo sapiens
ggtgccaattaaatccaacaaggtagctgagtgtggtggtgcacgcctgtagtcctagctatgcaggaggctgaggtgggaggatcacttgagcctgggaggtcgaggctgctgtgagctgtgattgcaccgctgcattccagcctgggagacagagcaagatcctgacacacacacacacacacacacacacacacacacacacacacacattccaacaaggtaatgtgtaggaggaagtacccgagctt

SEQ ID NO: 27 - DNA, 335 bp, Homo sapiens
caactcctgcagccctttacgccaagcacagaaatccaggaggcagagcctagcgcttgatgacatggtaattgggcctggaagtggggatttctgtcacttacctctccttgaaaaataatcactattgccaacgcctggttaattagcctgattcaattctcttcagcctcattttgctcaaatctaccagatttgtggtgctccttggtcctccaccacactttctacccctcatcccactttgtgtgtgtgtgtgtgtgtgtgtgtgtgtgtgtgtgtgtgtgtgtgtgtgtgtaggacatggccaggaatcctgactggcttcctttaaa

SEQ ID NO: 28 - DNA, 167 bp, Homo sapiens
aagaccaccctcctgttgtgctctcctgaaatgtattcatatccacccatacacacacacacacacacacacacacacacacacacacacacacacacacacattctctctctctctctctttctctctctctcttaaatgtcagttttctcttcctgctttccaga

SEQ ID NO: 29 - DNA, 255 bp, Homo sapiens
cttgacattcagggccttctgagtacatcatcttgtcaagaaacactgaactattcagtacacaacaggtcagaggtgcccatttgatagcctgaggatggaatccttattgcagcattttgcgtcatgccacatatatgtgttttttcaatcctcctctgttttaaaaattggaaaatttcatacaacacacacacacacacacacacacacacacacacacacacaccccccataccacaccacaccacatca

SEQ ID NO: 30 - DNA, 152 bp, Homo sapiens
agcctctgactctcctctgtggggctaatccagaaaatcttactttagaaataacaataataataataataataataataatacctcattcatctttacttatcatgtgctagtatgtttctaagccttttggcatagccttcaatgtccct

SEQ ID NO: 31 - DNA, 230 bp, Homo sapiens
ctcttcccatgtcctgcttctctccttcctgcgggttgggacccagtaccctccatctctctcactcctcccctctcaaacccttcttttaggaaaggagtccaaatcgaccacttacacctcagttcaatgcaagccagtataattaataaggaacatttaagggtgtgtaagggtgtgtgtgtgtgtatgtgtgtgtgtgtgtgtgtgtagctcactctgcctctgcc

SEQ ID NO: 32 - DNA, 360 bp, Homo sapiens
  misc_feature 33, 36, 72, 281, 311: n = A,T,C or G
gatcaccagggaatctagatggaatccatagtnctnccctgcaagaatgctgcaattctgtaccgtggaggngccaacagaatcaccaggctctgtgactcagtcacaacaccctgacctgcccctgtccattctccatatcatacccagagtggtcttttcaaagcacagctttgaccaattctctgtctttcacacatacacacacacacacacacacacacacatgcgtgcatgcatgcctgaaatagtatagtattgctcttaagataaacattaangttcctaccatggtacagaaaatatatgtngttaggccccgtggctctttcttttccagactcctcttacccttttgtg

SEQ ID NO: 33 - DNA, 133 bp, Homo sapiens
aaatcttccattgcagaccaattaaaatttaaagattttctctctctttccccctcttctctctctctctctctctctctctctcacacacacacacacacacacacacaactctccaagcacaaagagctga

SEQ ID NO: 34 - DNA, 245 bp, Homo sapiens
tgagtggatgagggagaaggataaaagtcataaaatgcctcgcaaaaactttgaggtctgcctgcctggtattacagagaagcttgcacaatacagaatgttttgtgggaaggaaggcaggcaggcaggcaggcaggcaggcaggttggttatgttttcactcttgatatctcaaagctttatgacacactcatggagtgaacataatctttgtggcatgatacaaagggactgaatcactcaag

SEQ ID NO: 35 - DNA, 278 bp, Homo sapiens
agctatgatcatgccactgcactccagcctggctgatagaatgagattctgactcagaaaaatataaacacacacacacacacacacacacacacacacacacacacacacacacaactttctgtctgcccccttgctcttcctgtcccatctctgcctttcttctttcctctctttgtcaaatctccttcgtctgcctcacaaaggccagtgagccccagccgcagaccagggaagccagcaaattaggaattttcttcacaaagttttgagtagct

SEQ ID NO: 36 - DNA, 184 bp, Homo sapiens
tctcccatctcctccctagctatcccctgcctggtaatcactgttttgttctctatttctgtacagttgggtttttgtttgtttgtttgtttttagattccacatatacttgaaacaatgcaatctttttctttctttgtctggtttatttcacttaacacagtgcactccaggctcgtctatg

SEQ ID NO: 37 - DNA, 377 bp, Homo sapiens
  misc_feature 124, 175, 320: n = A,T,C or G
ccagaaagcttcaccaaggggcgagcatgattatgcatgagcttcttaaatctggacttcccgacagcttctcatgacaggtcttctgtggaagactccttagattcagaccatcaggcctttnaaaagcacaggaacctactttacctcgcccaactctacggatgggataggnacttacaaggacatttcctcattggattccaatgttcattctccccttctctctctcaattaatctccccctcttctctttctatctacacacacacacacacacacacacacagagagagagagagagagagagagagagaganagaaacagcttcttcacagcgggaagcaggggaagggtatctatttccggcaagatc

SEQ ID NO: 38 - DNA, 379 bp, Homo sapiens
aaagtcagctagggcgactgagccagagagatggggcacacagcaagaggagacctgacaaagtgcaggtgtgtcctagagaaggcaagcgagaccactgcatgattggaataccagccaacccttgcctgttcttgttccagcaaagtgcccttttaaaataaatttatgtatatagtctctgtgtgtgtgtgtgtgtgtgtgtgtgtgtgtgtatagacatatagaaatatatattcctaattcagaactcattcgtaagtgcacacactgacatgtgtttcatgtttcccaatttatcccagagcctatatgcagtgtttggctgcacaagtaggcattaaatgcaaccactgggaatgagaatggtggccacaac

SEQ ID NO: 39 - DNA, 370 bp, Homo sapiens
  misc_feature 24, 97, 104, 274: n = A,T,C or G
agctttgaaatcccatccaaactnattggcgtttcaaactgaatcccagatgttcacttactgagaaataaatgaatggcccaattcgtggactgangcagggnccctcacaaatagattccaggtgtgttggcctctggaccactatctttctctgttttacatacacatacatacacacacacacacacacacacacacacacacacacacacacacggcaccaagtccatcctgaaaagaattcaacgtcatctccaagttagagccagtntaggatgaacagaggtagttacctaacacaaataacatattttcaattgtggatgaaggcaaagggctccacattcacactcttgtgccttcaata

SEQ ID NO: 40 - DNA, 154 bp, Homo sapiens
ggcatgggatgtttgacctaagagatggactaaagccaatgagtaaaaatgtaaagcgtacttagtcaaataaattcttctctctctctctctctctctctctctccttattcatcactcttgggccgtgatgatgatgagggagaggagcagt

SEQ ID NO: 41 - DNA, 390 bp, Homo sapiens
tatttgcctgcctgggttagatgattctccaggcttctacacaattttatgtttatatgaaaatagccacaaagggaaaagaggacaataaaacaagagatatgaataataatgtattgtatacttgaaatttgctaaaagagtagatctcaagtgttctacatacacacacacacacacacacacacacaaaggtaatgaatgagatgataggtgttaattaacttgattgtggtaatcacttcacaatgtatacatataaaaacatcatgttttacaacctacatttatacaattcctcaattatatatcaataaacctggaaaaataaagatgtataaaaaagatttacaaataagatttttaaaaaaggattgtgaggaaacaaag

SEQ ID NO: 42 - DNA, 192 bp, Homo sapiens
accagctaacctgccatgagactgttgtgtagccatcttcacctcctcatcttcagggaaggggatgaaaatatctgtgcactgcaaatgttaactatatatacacacacacacacacacacacacacgtacagtaggccctccataacctgaggttccacatctgcatattttaccaactctggtccctgc

SEQ ID NO: 43 - DNA, 242 bp, Homo sapiens
ttgttcctgaatgggaggaggactggtgagtgagggggaaagaatggagacaggactgagaagaaccagaaattaaaataatagtagtaatagcctaacatgtacacgtatatgagatctatctatctatctatctatctatctatctatctatctatctatcatctatatatctatcatccatcatgtatctatctatttgcatatataagctataatatctggctctgttctaattgttt

SEQ ID NO: 44 - DNA, 249 bp, Homo sapiens
ccaggcttggatgagagaataatcttaaggaagtcagcatatgttctagaaacattcagaagacaaaagagtctgttatgaaagaacaaagtatttgtaataataaattgaatgttacatggacacacccagacatacacacacagacacacacacacacagtttttcttctctctctctctctccccactcccctctctcatactttgcaaacaagctcctcagcagctggtaagctgttccctgtcc

SEQ ID NO: 45 - DNA, 305 bp, Homo sapiens
tcctgactgctcaaagctcaaggtgttgcctttttcaaatgggatgcaatagcctactcattttccaagattaaagctagagagaagaatgaatgaatgaataaataaataaataaataaataaataaataaataaatgagcaaagttaatattagctggaaaaaatagggtacaggtggaaggaatgaacccatattgagagtccactatgtgtcaaattccttgcatggaatctctaaggtctgtctagcttaaaagcaatgccagccttgctatctgtacttgatgaggagatggatcggaa

SEQ ID NO: 46 - DNA, 353 bp, Homo sapiens
ccaaactgcaaacccaaacttctacaatgaattcatgtgcaacttattctaaaagatctatacacacacacacacacacacacacacacacacacacacacacttcctgtcctattgctcttcactacttccttcatctctgtgctacaatctgggttcatttttcttccccttgagtaatttattatgttttttacagtgagtctgttgctcaaaaattcttttagtatttatttgtataaaaagtcttaattttgtcttcatataaaattttgtttgacactctattataaattgactgttattctctttccatgttttccggacatagttccattgtcttctgacttcca

SEQ ID NO: 47 - DNA, 267 bp, Homo sapiens
  misc_feature 4, 55, 133, 189, 227, 228, 252, 259, 263: n = A,T,C or G
ttcnaccttatgggtatatcgaattgtaaccccgttgtaggtcaaggagcatctncatatatacatacatagatgatagatagatagatagatagatagatagatagatagatagatagatttaattctaaantttccaaatactctttcatttaaatgattatagttttacaacaatttcatatattntataggtaggagaattagggttttccagagaaataganncaataggctgtgtgtgtatataangatttantttnaaga

SEQ ID NO: 48 - DNA, 299 bp, Homo sapiens
gttgggcatgatggtgtgtacctatagtcctagctacctgggaggctgaggcaggaggatcccttgagcccaggagtttaagactaacaagactccatctctgaaaaataaggcaaaaaaagtatgaagaataaaataacaatcacttacattccaaccacctataattaatcattgccaacacctgaggatatttgcttccaatctacaagactgcattattattattattattattattattattattattattattattattattattgagatgggggtttctctttgttgcccag

SEQ ID NO: 49 - DNA, 393 bp, Homo sapiens
gcagacagggttcaaattccagcctcccctcatattagctgtgtgatcttaggcaagtttattcatgtgtaaaaagaaataataacctcttctcgtggggttgcaggttaaacaaaagagtaggtattaaaacaactaaaagagtatgattggattgtttataacacaaaggataaatgcttgaggacatggatccccatcttccatgatgtgatttttatgcattgtatgcctctatcaaaacatctcatttactccatatatatgtgtgtgtgtgtgtgtgtgtgtgtgtgtgtgtgtgtgtgtgtgtgtatgtgtatgcacacactatgtgcccacaaaaattaaaaattttaaaattaaaaaattttaaaaataaacatgctgctgggc

SEQ ID NO: 50 - DNA, 201 bp, Homo sapiens
agctgccagcacacaaggcccagaggtactttattggatgccaaattcttttaacacaccatgagaaaagaagttgacaactttcccatgcattttggaaggtgtgttagaacgattcaacacacacacacacacacacacacacacacacacacacacacacatttattgggttgggggagccttaaaacttacaaatct

SEQ ID NO: 51 - DNA, 246 bp, Homo sapiens
aatttcttaccctttatccccgtcttctactcccattccacatgccccccaccccccatgaatgatttgtctaatgcgttgaatatgcacgtgtggttttgggtgcatgtatgtttacacacacacacacagactctctctctctctctctcacacacacacacacacacacacacacacacacactcatgcctctcctttgaagaggatcagatatggacagcaaagggcattagcatcttagct

SEQ ID NO: 52 - DNA, 351 bp, Homo sapiens
gctccaaagttcctgattccaaagcctaagttaagccatcttaacttatatttcaggtgactagtggaattttttatgcccagtgtaggtggtaatgacgatggagatatggcgatgatgatgatgatgatgatgatgatgatgatgatgatggcagtagtggtggtggtgttggtgatggtgttgaagatcaccatgtctgaccactgttgtctgtgtcctttgtacaattgttcagatgcagtgtcctggttgtcacatagatgtctctgactgttttacaggccttcacctaccaccatatccaggagatcatggtccagctgctgcggacagtgaaccggacagtca

SEQ ID NO: 53 - DNA, 364 bp, Homo sapiens
ttaacccactgctcccattttgctggtggaaaactgaaaaccaaagagattaagtcatttacccaaggtcatgtaactaatatattgaatctcagatgttttaatgattttgactcatttccaatttgcctggctatatagagaaaatatttgaggaattgacagggaacacacacacacacacacacacacacacacacacacacacacacagagggagggaggggagagagagagacagagacagacagagactgaacagattatttctccactgatgttcattatttagatctattttcaacatttaaaggcaattgtcagcatagtcaattcagccattttaaaccatcaagggccaatg

SEQ ID NO: 54 - DNA, 161 bp, Homo sapiens
gcaacctatttgttagcagcacatgcgtgcgtgtgcatgcacgtgggcacacacacacacacacacacacacacactctttgcaggggaattttgagccagaaatttatctgtaggcccatattcattcctttttgcacatttctattgtgaccttgggca

SEQ ID NO: 55 - DNA, 269 bp, Homo sapiens
caattccacacagctggagagtaacaaagccagaaatcacatccatttgtgtgtgtgtgtgtgtgtgtgtgtgtccaaatcctgtgattccagtgccaggatacactgtcttccgtgttcaacagtcatgaaagtattttaatgaacacctggccctgcagtgcctgatgtagcaaatgctgcagatactccacccaccgactcttggaccacccaaaatccactggcagcttcagtgaggctttcctacttctttctttccctgggct

SEQ ID NO: 56 - DNA, 251 bp, Homo sapiens
cactggacttggagtcaggacatcattttaacagctttatcgagatgtaatttacatgccatacaatttacccaaagtgtacaatcattgactcttagtatgttcacagagctatgtaaccatcaccacaatcaattttacaacattttcattactcctaaaaagcaaacctgcaccccttagccactgctctgccaacacacacacacacacacacacacacacgcgtgcgcacacacacccaaacactc

SEQ ID NO: 57 - DNA, 141 bp, Homo sapiens
cgcgtgtacctccacatagatgtttgccaatgcctatgcccaagacacacacacatacacacacacacacacacacaggatacattcaagcacacactaatgtatgtgcacttgcctgcacagagtccacatcacacaggc

SEQ ID NO: 58 - DNA, 328 bp, Homo sapiens
agcttctagtctgctatgttgctaattgtcttcttggtcatcttttaaaaccatttctgtgaaattatagcctccttactcccttaccctgagtctggatgtttctgaagatgactgatctctacagtgagaaggccctgggaattgactgactcactctctctgtctctctctctctctctctcacacacacacacacacacacacacacactcatatacatacacacatagatacacatatacatgcatccacacatgcacaccctgggcacacccacacaccctacaactgcacatgcatgcacacacataatgttaactgaagg

SEQ ID NO: 59 - DNA, 313 bp, Homo sapiens
agcttttggctatggaaccttaggcaagatgttcataaaccctttaatctctagtgcccttgttcataaaaagaagtgaatcggatccctgcaggactgtttttgtattcagtgcacaggtgtgtgtgaagacacccagcatgttgccaggcacacagagatgtctaccttgatacttttctctcctcctccccgcaaatacacacacacacacacacacacacacacacactcacacactcttattttgatcttggcctgaggctgacaagccccagattagtgatcagtgacaatttcggctttatcagct

SEQ ID NO: 60 - DNA, 242 bp, Homo sapiens
cgaggatgcacacctcattaattgaggagctaggatttagatccagagcctcatgattctaaagcctgttttttgtttgtttgtttgtttgttttgttttggccacactaggtttctagaaacttccagttccttcttaaaagtcctttttgggcattccggcctaaatcccaaaactgtggtctgggtacaagagagaattaggccagtgagaaaaatttaaaccaccctgccctctaaat

SEQ ID NO: 61 - DNA, 623 bp, Homo sapiens
cttgatgtcttctttcaccatcccctggcacccgcctatacatttattacttgaaacagactgacctttatttggttaggccactgtggtcaggtttctgcaacatggggtcacatgccttcccaactgacacaagtctcaagctccttttctcttctttttataacttctagaagcatagcttctaccagataaggatctaaccttttcagtggaaaacaaaaatggcaaagaagtaaagaaagaagagagagaaagaagaaagaaagaaagaaaagaaagaaagaaagaaagaaagaaagaaagaaagaaagaaagaaagagagaaagaaagagagaaagaaagagagaaagaaagagagatggagagagggaaggaaggaagaaaagaaagagagggagaagaaagaagacagggaaggaaagggaagggaaaagagggaaggggagaggggaggacaagggaaggggagaggggaggacaagggaagggaggaaggaagaaaggaaggaaagaaggcaggaaggaaggaaggaaggaaggaagaaaggaaggaaggaaggaaggaaaaataactagggcctttcacttttgccttcaatagcagagtggccctggatat

SEQ ID NO: 62 - DNA, 372 bp, Homo sapiens
tattggcagagggtgagtccagtgtataaaagcaactatatttgtgcaataaggcaacctctaaacacaagttactacttcatctaatgccacacacacacacacacacacacacacacacacacgagtcatctgttccaaggctgttgcctttactaagtgatgctatgttggtccttgaggtggtgccttcctgagggttttcaagcatagctttggccatgcacagttttcttcttatacacactctgaggagccccgccgtcacggtaatgcacctgcctcacaagctggtgggcagcttaaatgaaatacacattttgctccaggcccagcactagctcatcaatgtgagctggtgttagcctcacc

SEQ ID NO: 63 - DNA, 140 bp, Homo sapiens
cagtagccaggaagctgaggaacacacacacacacacacacacacacacacacacacacaaacacaccccttcctggctccagttccgcaccaccccacacccccaacaccggaagtagatttctcaataggcagggctg

SEQ ID NO: 64 - DNA, 301 bp, Homo sapiens
tttgccagaatgtcctcacaccaaatagtggaccccttcttttgctgatttatctgctattgtataggtgtatgtgtgtgtgggtgtgtgtgtgtgtgtgtgtgttaaggcaggtggtagtatgtgtagggtagggtttccccagtcacctggagccctgagtgcctgcttccctaaactaggccagtttagctgactggcttcctttgtgtattggtccattctgcatcaaaagcatctgaattttcattcaatctctcttctgaattttcacttttaaaaacctgaccagtcccttgtg

SEQ ID NO: 65 - DNA, 203 bp, Homo sapiens
ctcctccatggtagggactggttctcttaggcccctgtatcctcaggcccagcatgcttgggaaaatgtttgctaatgctttgtgactcaaaaggaatcacacacacacacacacacacacacaaacacacacacacagtttttaatattatcagtcatatcagccccctgaggcagctgctctgttccagacaaaccctgtt

SEQ ID NO: 66 - DNA, 138 bp, Homo sapiens
gggtacaggagagttgtggtgggcattagtactactcctgctgctgctgctgctgctgctgctgtgtccactgttagtgacagaagtgggaaaatatttaagttgagttcacattagtgttcccagtttagcgtgagc

SEQ ID NO: 67 - DNA, 250 bp, Homo sapiens
ccatgagttcaggcagtgggttaaataagatttcccttgaagtcgaatgaaatcacaatgcaccacacacagggacacacacacacacacacgcacgcacgcacatcacacacacacacacacacacacacacacacacacacacatacacacacacagtctccctggggccaatctactgccccctgaacctcacccatcagccaggtgcctggccccgggtctgtctcttagggttacatgctcccgg

SEQ ID NO: 68 - DNA, 664 bp, Homo sapiens
acttatggaacacctactcagtgccaggtattgttgtagatgccaggagtacagcagggaataaaacaacatccctgtcctcgacacaaacacacaagtaaatagagaaggtcagagataaatgctgtgcaggaaaacaaagcaaagtgagggatggagagtgcggaaggttggggcacttttgtttcagatgagtgtcagggaagcccccttggaggaggcactgtaagggcacagaatcgaatgaaaggagtatgtgaaggtgcttaaattgtttctgtttggtttggtgtggtgtgatgtggtgtggtgtggtgtggtgtggtgtggtgtggtgtggtgtggtgtggtgtggtgtggtgtgatgtgatgtggtgtgcggtgcggtgcggtgcggtgcggtgcggtgtggtgtggtatgggttgaggctggccttaggagcctgttggccttccaggccagtcctgaagcccagcccagagcaccagactctgcagtcagtcagtggagggcccacatctcagccaatgcatggctttgggtggtgacttcatctcccctagtgttcctttccccctctgcaaaatgggaatggggatggctcagaactcccagcgggagttaggaggaataatgtataggaagtatgagcagagtgcctgg

SEQ ID NO: 69 - DNA, 120 bp, Homo sapiens
tgatgtgctcgttcccatagccccgctgtgtgtgtgtgcgcgtgtgtgtgtgtgtgtgtgtgtgtgtgtgtgtgtgtgtttggtggggtgggaggggaggcagaagaggaagagagggca

SEQ ID NO: 70 - DNA, 139 bp, Homo sapiens
tggtgatcagctcagtgtccttggaaaagagcagaaagtggtatcacgaacatatcttctcctttgcttccttctcctcactcttcatcatcatcatcatcatcatcatcaaatatggatctgtgaggctacctctggg

SEQ ID NO: 71 - DNA, 340 bp, Homo sapiens
ggaggagagaccagcattcacattcagttattgttgttttaaatccattacgcacatacataggagaaaatttcagcaacagtcaccctctgaacccagttcctcagttctctccagaggcaactaaaatgctcaattattagtgtatccttttggaaatattttatgtatatgacagtgtgtgtgtgtgtgtgtgtgtgtgtgtgtgtgtgttcctttccaatattaaaataatattaacattggtaatagtggtactaaacaacttagggtgttttttttttcatttaatagtatatttttagtatctttccaggaaaagatacatggatgtgccaca

SEQ ID NO: 72 - DNA, 362 bp, Homo sapiens
  misc_feature 49, 53, 57, 259, 322: n = A,T,C or G
tcaataaatgattctggggatgtgtctgtctgtccatctgtctctctcnaganacanatacacacacacacacacacacacacacacacacacatcctgttagttctgtttacctggagaaccttgactaacatacccattaaaaccaaaatatgtccttcagggtgttaatgtttggttgaagaaacacagaagtttaacaattgtatcaggctgggcacggcctataatcccagcattttgggaggccacaatgagnggatcacttgagcccaggagttctagaccagcctatgcaacatagtgagacaaaaaaatgaanaaaattaggggtgtggtggagcgcacctgtagtcctagct

SEQ ID NO: 73 - DNA, 187 bp, Homo sapiens
gagttctatggaacagcatttattgaataataacatttcaggaaaaaatataagctttactgtatattaaaatacatatatacgtttatatattatatattatattatattatatattatatatattatatatattataatatttatatattatatagatataaatcaactacaagatccagttcaa

SEQ ID NO: 74 - DNA, 219 bp, Homo sapiens
ttgcctaagatctaggtgttcaaaagaatttctccaatccacttcagcctgttattatgtatgtattctgttttaaatgagaaacaagagtcattttctccagaataatagaaccatagtgacacttgaagtaagtccagtggtcctgatatgataataataataataataattattattattattattattattttgagacgaggtctgtatctgttg

SEQ ID NO: 75 - DNA, 302 bp, Homo sapiens
atggagagacacggagttgcttgagggtacagtgcctgtagatactcaataaatatttgtttaattaagaaaatttctgttatttgtgtgctcatacataccatttcagtctggtgagtattgttctttcctagagtttacttttaatcttaagtattttccaggtcctttgttgacttctgtttaaaccacagtacacacacacacacacacacacacaacttttgtgtactataatagcttccccaaaattataatttagtcattgtgatgcagatcttcttccaaggcctctactttgg

SEQ ID NO: 76 - DNA, 368 bp, Homo sapiens
aaacaaacaaacagaaacaccaaaatggattccagcatcttataagtgctttctcttatgatcgagagtaagacaagcatggctactcccttctcttctattaaatattgtactaggggttctattgagataaataggcaaaaaacaaaacaaaacaaaacaaaaaggcatccagatttaaaaaaaaaaggaatctaggaataaagggattacatctctacttgcagatgacatgatcttatgtataggaaatcctaaggatccactgaaaaactgttagaactaataacatcagtaagtttgcaggattataagattaatacaaaaactcgactgaatttctgtgcacttgcaataaacaacccaaa

SEQ ID NO: 77 - DNA, 247 bp, Homo sapiens
tctgcccacacactttatgctttaaaacaaaaggccatgttgaacttgtagaaccaaatgattgctaattacttggggcgatactagtgatatattatcttacatacacacacacaaaacacacacacacacacacacacacacacacacggcttgagtccagcatggcctactgattttaaaataggaaatgacagtgtaaatgccaggataaaggacaaagtgctctgacctgttgccaaacctt

SEQ ID NO: 78 - DNA, 270 bp, Homo sapiens
gggtttaggacccacgtatcttttgtttgtttgttgttgttgttgttgttttggagttcaacatgtttatggtgtgtagccatggttgaaagcttttattttataagatagacaaagcaggaattattattctcattttacaggagaaaaacagaagggctatgtggtttgttaaaaggccacacagacagtaaagaacacagcctttacatggtcagcctcacattctagtactcattttattacactgctcttcttctctgttgcctg

SEQ ID NO: 79 - DNA, 261 bp, Homo sapiens
ctggcctctttgcccattttctaattggattatatgtggggttttgttgttgttgttgttgttgttgttgttgttgttttgctgttgtgacgttagagttccttgtatattctagatattaatcccttgccaattaatagtttgccagtattttctcccatcctgtaggttgttcactctgatgattgtttcctttgctgtgcagaaggtatttaatttgatataatcccatttatttacttttgtttctgttgcctgtga

SEQ ID NO: 80 - DNA, 304 bp, Homo sapiens
ccatccagggtctaactccagcatttgtataaacttggacaatacttttgctacagggttgtcattgaaagtattgcctcattatatttcttagtggtccctgtatgaagccatataagagaaacttcttaatttagcactaggaaatgcttctgttgacttgagatgtgtgtgtgtgtgtgtgtgtgtgtgtgtgtgtctgtgtgtgtgtgtgtgtgtctgtgtgtgtgtgtattcccctaattgataaactataaaataatctttctcttttcactttggccatctggaaatttgccaccaa

SEQ ID NO: 81 - DNA, 371 bp, Homo sapiens
tggcttcccaatcctagaaaaggaagaaagctgcatgttgttgttgttgttgttgttgttgttgttgttgttgttgttgttagatggagttttctgtcgcccaggctggagtgcagtcacatgatctcagctcactgcagcctctgcctccctggttcaagcaattctccagtctcagcctcccaagtagctgggattacaggtgcgcaccaccactccaggctaattttttgtatttttagtagagacggggtttcacgatgttggccaggctggtcttgaactcctgacctcaggtgacccacctgcctcggcctcccaaagtgctgggattacaggcgtgagccaccgcacctggctgaaagctgcat

SEQ ID NO: 82 - DNA, 258 bp, Homo sapiens
gccttcgcagattgtacctcttcctttcacccttctcgctggcctgtgcttctctctccatcgtggtctcccacgccttggtttctcctccatccccatccccatctttcgtgagcccctccaactctctccccgtgttttgtacggtctcctgcgttcacttgatttcctctcacccacccccgccccaaacacacaggcacacacacacacacacacacgcgcacacacacgggcctctcgcactctccttctcct

SEQ ID NO: 83 - DNA, 226 bp, Homo sapiens
tgactcttggcctctgtgtgtctctgggtttctttgtctccctcctctccacggtcctcttgtccttttgtcttccctttcttgtttcttgaatctctttgcctttatgtatctgtctttctctctctctctctctctctctctctctctctctctcttctttcctttctccctgactccctctctccctcttccaggcccagctcccagtagctcctaaggcaaa

SEQ ID NO: 84 - DNA, 215 bp, Homo sapiens
catttgggataaatgttgtctttagttttcaactactttttctttggcttattctctctctctccctccctccctctctctctctctctctctctctgtgtgtgtgtgtgtgtgtgtgtgtgtattcatgttttcttaatctatctgaattgttgtgtcggttttccatgcgaatttccagttacctccacagtattcgtttcagaatgcttcct

SEQ ID NO: 85 - DNA, 370 bp, Homo sapiens
ttgcagtttcatgaaccaagtattactgcctcaacaattaaaaacaacagacaaattatttaaaaaaccatgaggcgagtggtggctggtggctggtggcagggcgggggcagggtggcctctgtgtctcatgctttctggttggtctgtggtctttgcactgagagctagggccttgcacattcattcattcattcattcattcattcattctttgaattcaacattactatgcaccaggcgctgagaaggcagccttagacagatggaaatccttgctttccgggagattccattctaatgggtcattgattcagtggcctcttcagtcatttgttcatatgcatttactcgtacctctcatgtgcca

SEQ ID NO: 86 - DNA, 339 bp, Homo sapiens
aactgaacctgggctgtgtcagtctaagacttatgcttggaacctgtaagaagaacaagtgtgcgtgcatgcatgtgtgtgtgtgtgtgtgtgtgtgtttggagggatagtgaagttttttcctacagctacaaatagaacatgctttcctatacaattgtactaatcaatattatttccttacattatctccagccatttccctataattagacattcagattatttcaaggttgttattcctataaacagtgatgtgatgaattttttaaagttggttcctcacatccgtctgttcttgtaaatgtatccatcatagaactggaccacaaaggttgg

SEQ ID NO: 87 - DNA, 150 bp, Homo sapiens
gggagttctctttcttcaagtgcttaggggagaaaataagtgagaaaaagagagatagaggaaggaaggaaggaaggaaggaaggaaggaaggaaggaaggaaggaagaagaagaaaaggaaacgaaaaggaaaggaaaggaagaaagga

SEQ ID NO: 88 - DNA, 331 bp, Homo sapiens
tccatgttattctctacctgttggttccttcctcattgaaaattggtgtatagatggtagatagatagatgatagatagataggtagatagatagatagatagatagatagatagatagatagatagatagatagatttttatttttggtctatctcctttactaaacagtaagctccatgaaaatatggatcatcactgtcttattcaccattatattctcagcatatggtattgtcctggtatagaatagattctcaataaatgcttgctaaatgaatgcattcatgagtgagtgaatgaatgaatatgcgagtggatgagtgtgtgga

SEQ ID NO: 89 - DNA, 370 bp, Homo sapiens
tgcttgagggcaggatctatatgtaattcctttctggaaaaccagggattgaaacaggatctggcatgcaatgggctggatgggtgaatggagaaatagatgaatgacagatggatggacaaacagatggaaggaaggatggatggatagatggatggatggatggttggatggatggatggatggatggatggatggatggatggatggatggatggacagatggattggttggtagatgtgtggatagatggatgggtgaacaagcgagtagatggatgagtaaatggctaaatctggtgcttttcttccagaatcctggattctgaagggaggctttgcagcccttcctcgtggatcacttgctctg

SEQ ID NO: 90 - DNA, 251 bp, Homo sapiens
ggctgaattactgggcatgtttctgagaagaaagaacttctattttaattatatatctacagaaaccaaattgcctgcttacagttttacatgtctgatgattggaagtttttgtttgtttgtttgtttgtttgtttgtttccacagactagcctctgactccatatatttcaaactttgttcctcttccactacccacatatttctgatgtgagacattctagaaaaatttcatattgcaagacggcttc

SEQ ID NO: 91 - DNA, 363 bp, Homo sapiens
ttggcaggattcagttcctcatgggcaccagacggagagtctcagcaaatcactagctggtgactgcagccaccgcagttctttatcacgtggttctctccatagggcagttcacagtgtggtaacttgcttcatcagagcaagccaggaagaagacccagagacagacagagagagagagagagagagagagagagaggaggcctctgaaagagagagagaagagagagaggcaaagagagaatgagaactccagaagtcactgtcttttatagcctaatcttgaaagtgacattcatcactttcactacattttcttccccagcagtgctcagtgggaggggattatacacggccatggat

SEQ ID NO: 92 - DNA, 203 bp, Homo sapiens
gcacatttgcagaggtttgaggtcccatcattagccatgcttcttggttcctgcactatgagtatacgtatgtgggctgatggcctcattcactggatacacacacacacacacacacacacacacacacacacacacacctcaccagggacttgggagtatctaaatgtttgagaatcatagagcagggagacatccaacac

SEQ ID NO: 93 - DNA, 326 bp, Homo sapiens
gggcacatacagctttccttgcaggaaaaaaacctgcttaactttgtttattatatattatttgatctgtgcttcatatattattcatatattatttgatcaagttgcttcatgtattatttgatcaaggaatcatgtgtgtctacagcacctattaaaattccctggcactgaaattctgtagaaaaccatttaggaaaagttgatctaactgtataattattagtaaaacatatacacacacacatacacacacacacacacacacacacacacaccacaagcaaacaaaaaaaaaccaccttaatggtctcctaaccaaggca

SEQ ID NO: 94 - DNA, 266 bp, Homo sapiens
gcatgttcgccacagagattcaattaatttaaataggtagaggacttggggcagtgcctaggacaacattacactcagggatggtgatgatgatgattataatgatgatgatgatgttgatgatgatgatgttgataatgatgatgatgatgatgatgatgatgatcatgatgataatggaaaagaagatagaggaggtagaagaggagacaatcatgatgttggaggtagactccaatcttcagaatcagaagctcagggttgga

SEQ ID NO: 95 - DNA, 224 bp, Homo sapiens
  misc_feature 18, 197: n = A,T,C or G
agcttaatctattatttnagaggcagaaagttaacttgcttatcctgaaaagaagtgcaaatatatcccaaaagtgccattctttcattcatccactcaaacagatacacacacacacacatacacacacacacacacacacacccttttcaccccttggtagtgtacagtctctgagttgtaaaaaatagtcattnctttctgcttgaaagactgtattagct

SEQ ID NO: 96 - DNA, 328 bp, Homo sapiens
ccagcatgatcctatgaatccttataaaagggagatgggaaaatttcacacacacacacacacacacacacacacacacacacacacacacagatagagacagagagaagaggataaggcaatgtaaccatggaggcagagatgggagtgctgtagccacaagctaaggaatgctggcagccacagatgctggaagagttgaagaatgggttccccctgagggagcacagccagatgcatgctttgagagttcagcccagtgctactgactttagacttatggtttccagaactacaaaaaattaatttctgtcgtttcaaaccatcc

SEQ ID NO: 97 - DNA, 257 bp, Homo sapiens
caaacgtcgctgacctgagtctgacctgggctgcctcgtgttaccaacatgaaaagggagtgagaaaatctgaggccaattaacttctctccctctctctctctttttctccccttgcccacctctctctctctctctctctctctctctctctctctctctctctcttttttccccctcctcttcttggagacatgatgaaatttcctgaaacaaaaactcgcagcccgttcaataaaatgctttcgcctttggtg

SEQ ID NO: 98 - DNA, 223 bp, Homo sapiens
acagttgccatttgctcatttaaaatgtagtgaggtgttttaaagagggtttgttcaatttaccaaaaagggaaaaaaagggaaaagaagaaacttattgttgaacgaacacacacacacacacacacacacaaagagcctggcttaatttagggataaagcaaagaagtcaatacccccacatcaactattgaaacctaagctattgctggagttgacagcg

SEQ ID NO: 99 - DNA, 364 bp, Homo sapiens
  misc_feature 7, 61, 86, 339: n = A,T,C or G
agctctncctagcattgttttcctttgcttcatttcctcttaaatgtgttggatgcacttngttcctgctaactaatctatctttncagtttcaaatcaaatgaacccagagaatttatttttacattattatcttcagatttagatttgttttgcttttaatcctgtcttcatgaaggggaaagccatgtgtaccagcatggttgataaaccaccaaatcgtgaaactttgcttgctccccaaacccccaaccacacacacatacacacacacacacacacatacacacacacacacacacacacacacacacacacacacaacctgggaaattgggnagaaaactggcaaaccttaaactag

SEQ ID NO: 100 - DNA, 132 bp, Homo sapiens
aagggaagggaggaaggaagaaaggaaggaaagaaggcaggaaggaaggaaggaaggaaggaagaaaggaaggaaggaaggaaggaaaaataactagggcctttcacttttgccttcaatagcagagtggcc

SEQ ID NO: 101 - DNA, 372 bp, Homo sapiens; identical to SEQ ID NO: 62

SEQ ID NO: 102 - DNA, 140 bp, Homo sapiens; identical to SEQ ID NO: 63

SEQ ID NO: 103 - DNA, 301 bp, Homo sapiens; identical to SEQ ID NO: 64

SEQ ID NO: 104 - DNA, 101 bp, Homo sapiens
gtgctcaatggctgttgaataaataaatgagaggaggaaagaaggaaacaaggaaggaaggaaggaaggaaggaagggagggagagagggagggaaggagg

SEQ ID NO: 105 - DNA, 203 bp, Homo sapiens; identical to SEQ ID NO: 65

SEQ ID NO: 106 - DNA, 164 bp, Homo sapiens
ttgagctgtttggcctcaatggcattttatctctctctctctctgtgtctctctctttctctttttttttttttcacattgagccatcttcttacagctgaggttttcatataaaaaagcaagttgctggtttctctttaaaagtagggcaatctggcagttct

SEQ ID NO: 107 - DNA, 138 bp, Homo sapiens; identical to SEQ ID NO: 66

SEQ ID NO: 108 - DNA, 664 bp, Homo sapiens; identical to SEQ ID NO: 68

SEQ ID NO: 109 - DNA, 120 bp, Homo sapiens; identical to SEQ ID NO: 69

SEQ ID NO: 110 - DNA, 139 bp, Homo sapiens; identical to SEQ ID NO: 70

SEQ ID NO: 111 - DNA, 340 bp, Homo sapiens; identical to SEQ ID NO: 71

SEQ ID NO: 112 - DNA, 362 bp, Homo sapiens; identical to SEQ ID NO: 72
  misc_feature 49, 53, 57, 259, 322: n = A,T,C or G

SEQ ID NO: 113 - DNA, 187 bp, Homo sapiens; identical to SEQ ID NO: 73

SEQ ID NO: 114 - DNA, 2002 bp, Homo sapiens
tggctgtcccctctgcctggagcaggctttgcccagatgtcctcctggctcactccctcacctccttatgtcttgactcagaggtcacccttccagattagactgcctgaccccttctgtgctttctgttttctccttattacaaatgaatctgcaccatatttcactgattgtgtttgctgcatgcatgagggctcacataaggatgtgctttttgtccactttgttcattgctgaatcactagcactgacagctgtacctggcacaaactgggtgcttaagaaatattcttgaatcaaggaatcaataaatgaatgttatagagaaagcaggagaatagatgataattgagaaaactgaagcccagagatgggaagtcactggccccatgtcacacagcagcaaatgcagaaccggtcctggaacttcagcctctcagccccggccctgtcctctcctgtgcttctcaccactttatgtaagttttttctttatttgtggagctctcagcaggcatttttctctctgtgctcagttggcatttttcccttgaaccagctgtgtcttcactctcttccccattttctccagaatatgttcttctgtttaactgaatgttctctttttctgcaggtctggcccaactgcaatatccagagacttttcggtgtcatatgaaagaaaaggagcaggaagccaagatgccccacctggcttctacatcagggtgatctgcatagtaagatgcaaagacactgacatatgcctgggggtaacgagggcagtggggggagggagctaagccaagataagcctcctccccaccaaacataggtgctactgagcaatgatagggggcatgctgtctgctctggtacttgcgtagggaatgctctgagaaacctcactaaatctgccctctagagtagagcaacctgggagctcaggcttccctttcctctgtgtgatgggttggcggtccttagagccagccatttcagtcctgctccttctctcctccccttcctgaccaataaagattgtgtgcttctgcccagtcagcagggtgggctctcactccatcctgcctctggtatgacagcacaattcccctcattctttataatcattataaaataaaataactaccttttagaatacttatttgatatgaggcactttgcaaacccacagtcctgcatatcccatttgacatatcaggatgctgggcttacaggttaccccaggggtggagttgggctcaatcctaggattgtctgcatctgattctgaagcttgttttcttttcccctatacacaatcattcattcattcattcagtaatttttaaattgagacatactatgtaccagcacctgttctaagcattggattatggtgatgaatgaggcagacagggtccttcccacaaataactaactctattcaagcagtgggagaaaaagcaatgaatgggaaataaatgcacaaatcaagtaatgttggatgggacaactgctgtggtcccattgaaacaagcccagagtgagcccagtgtagggacttcttcattgactggttgggaattgagtgacaatcggttgctgcatgctgatgggtgccaaatacaaccgtaaggaaacactcccctgggagggaggcgggatccaggttaggaaagagccttggattgaggcagagtgtcaggaagtggggaggtacgcagctgaccttggagaaaatccctgagtggtgcagatctcttgaatctctgagtggctcagagtcttcctggaaatgcagaaatccccatgccacttaggggcatcttcattcatctccagccctcctttattaagtcatgtataccatctcctctcttatgcttaatgtcatgccactcttcaatccttgtcccttctttccctctgtgcctgcttgtggtttactcctgctgacaccaaaggctgaggaggatgaaagaacaattccagccctgac

SEQ ID NO: 115 - DNA, 2002 bp, Homo sapiens
ggtaattcttaagctggctgggcctaaaactgcaaactggtattgggcatgccagaaggtaaccataaatgggctatttggagatttctaggaagaagaatgacattttgtttcattccattccatttcatttcattccattaatactaaaaatattaactaaagcatcatttctactatatatccagaagagaacatggtcttaggtcttttaataaatgaacttcagttgcaaactttctgctgtgacgttatatttctctttccaccctagaccagcccctaatggggccatgaagtcagatttttggttcatggtgttgtcggggcagcatagcccagaattccacttccttccctgaggacacatttattctggtagatgtgctgttttccatttaaatgtcctttggcaataaaagagctggctccaacagcagaccacggggctggctttgtcggcagacaccacgtgttcatgactggcagctttgtctggaagagggagcttttaaaatgcagttctatgctgactctttggagtcttcccaggaagataactgctattgcattgcatgcttaatttagagcacctatttttccctctccttcaaggtttctgtatatcttctcagttcatgaaattaattatttgggtacaataattgtacaaaggcactttatcagacacttcgtataaattatttctcattctcaaggcaacttggaaaggtcagtctaggggtcagctgctacttttggtgatcaggcatcaccccctccttcctcttagtacgttatgacagtggcaagtgagcattacctgtggaccccaaaggagttcatttccttagagccagccattcctcagttaatctggtctgtcagacactctgtcccaggacactgagccttgagcatgtgaaggtgtgggctctgctgggggcttggcagccagcacctgtctgtgtatcacctggctcctgcagcgagaacctgcaggtgtgatttctgcagcctggccctctgagattccatggctgctgaccattttccactttccaagactgttcacattcccagcaattctgtgaggccctggccttcaaaggtgttcaatacattccttttttttttttttttttttttttgagacagagtctcactctgtcacccagcctggagtgcagtggtgccatttcagctcaccgcaacctccacctctcgggttcaagcaattcttctgcctctgtctcgcaagtagttgggattacaggcacacattgccacttacggcttttttatcattattattattatttatttttagtagagatgcagttttgccatgttggccaggctggccttgaactcctggtctcaagtgattcacccacctcagcctcccaaagtgctgggtttacaggcgtgagccactgtgctgggccccatttgttatttaagggagagtccgtttctgctgtttgtaactaaggacctgtctgatctctaggaattattgaccccagttttcagataaagaagttaagcttgaggttagagcttttgagcaaaaactcctctcctagagaactcaagtatccaggaatactcggtcaaggctgggctggaccaggtctgtaatcctgatattcagaaaagggatgatttctcctctttggtttggttttctcactgaggcctgcacaccagtttatttcctgacttgtgcattcaacatgggcaaatccaggtcaacaaagactggcagcttattcctgagtacagttccaccaggtatggcacacaaagtgatatgagttagaacacagatggatatagatgttttacaaatgtaagtttgcataacacacacacacacattgctatgtgttagaaaaatacaataagctcatctaatttattatttcatgtgtcttattgctcagaaagaggaaaagattttattgaagttgagaaaagaaattgaattaaaataata

SEQ ID NO: 116 - DNA, 2002 bp, Homo sapiens
agaaactccgactgtctttcagcacacagaagacactgtactggacccggacattaggcagacacccacgcctgactttcaggagaaaagagaacatgactaacggatattcttagtagatggtttattagaaaagagaacatcttccagcatgtgtcctggggtgatgggtgtgggaagcactcagtccatagtcctggtccctggcttccccaagcccagcaccatgaatgtacagtggaaagcagagggtgcagcgtctcagaaagatgcttccactcacaaggattggagctcacaagtgagctccataacctgcaaaccagagaaacctgagacactgccccttggccattttatcaacggagactttattgtgattatcccggcagggggccgagctctcctctctgcaacaggaaatgctctttagtgaaaatgcagcatttctccaagggtaacaaagctgaacgcctgcttagcttatgaaccctcagttggcctaggtggtgcaaagaccctgctgttactgctttgatcatcagtactgtggactgtaccaggagatccctgggaatgtgctctgggcggaagcagcttttatctttggccctcacccatgctttatatggtgaggttgggaaaatggcacaaggcttctcctgaacctcaaatcaacacccttgccccatttagatcctatctggctgtttcttgctaatattactgcatcactgcaccatctttcctatttcagcaaagtggagtcatgtgtggtttatggggtagatggaccccaaaactgataatatgaatcaagctatggtgtttactccctaggaaatgcacaatttttctggaaacctacagaagcttcaaatgcattcgccatgcaaagctaagtcagcagaacaacccgtttggctttggaggctagttcagttccgcggacagggagaaagatgaggcagactgtggtttttcagttcctggagcttacaggagctccaaagctccctctcttcccaccctggctgcactgttcttaattttagataataccctgccttctcgtattgctgctgagctcctagcatcctcagtttatctgtctgtgaaatgaaaaatctaatgttaaattttttacctatggcatgagagagatggctatggctcttgtgagcctctctgcagcccctcttttccttcaatcaccctctgtctctcctgccttctgcttattctctctctcccctcatccccactttcccagtgggtcctctgttctctttttttttttctttttaaatctctctatgcctccagccgagaagataaagagtgtacatctttctggttaaaaagttttgctttgcagaaacacagccaatttatgattctggccttcccagctagggacagtgttcatttacatttaggaccatgaggagagaggcttagctgtgtgtttctgaggccggagaaaattacagtgatatataacagtgctgcactcatagaggtgctgagccggggttgggctcaggcggccgctaagctcagagtggaaagtttcagaggggaggcagaaaggagaggtctatagctcctccagattctaggtattaatttactaagatattcctaagccagaaaacagagacagaagacaaagagaaagagggaagaagagcaagacagagagttagagagagacaaagagagagagttagagacaaagagagagtggagaggagagagagcaaatattgaaaggaaaaggaaaaagaaagaaacctgacagctcatgaactttttaaaaagttacaaattagatttgaagagatgggcagaggtttaagatttcttcattaggctgggtgtggtggctcatgcctgtaattgcagcactctgggaggctgagggtggcagatcatctgaggtcaggagttcgacaccagacaggccaacatggtgaaaccctgtctctactaaaaatac

SEQ ID NO: 117 - DNA, 2002 bp, Homo sapiens
tatatacaacctggaagctctttttccaaccatatcacagacaaagaaattgaggcttgtacaggtgaaggggcctgcctttcctttgctcacaggaatgtgaggatgatacaaaagtgaaggatattggcattcttcaggcagggagataacctggacaggggtggtgcagcaggcatgtgcataaaaggagcaagagaagccttctctgtcgtgagcaagcttgcaggccagatggagaaaaatgaagtaaagtcaccccaaagcctggattctcatctggagtgcctcttgcctcttgcccttcccagaacgctccagcttggcactgggctggaattccactaagaattgagttgatttcgtcatctgaggccctgggcacaatgacaagggtggttttctcggatctgcagtgagcattacaccagagtgtgggaaacagtgcctactcagggaccccactctgggacccagggcaaacttgccatcgtctccagtcagctcattagccgcccaggactctgccagcccatccaggcagtgatgtaattaccaaaatggagatgaatatttaaagggactcttacttaaccgatatacttcctctccaagttccctccttcaccggctctggatgaatttctggagggattgctctgacataggcccagagctacctgtggtttgacctcatcatgaggcctttcttcaccctttcttggtggcttgccttgagggtgttaggagatggtccattgtctgactgtgaacagcagggcagctcttatattctccatcaatggatctctggggacaagacccagatgggtggggggacaggggaaggaaacataaaagccaaagggactggatacctgtaactaattacccctttactgtttctgtcaccagaccttagtgccacaaaggattgggggtcatttgtgacaatgtatgttgtaaaatgtaaaatgcaagtgaccacaaatctgaaagcaggtatagagctttggttaaaataatgcaggctctccactggcattattattgttgttaggagagtctggtgctctgttcaagggcttttctgtgctatggattatctctgtttagcacaaaatatcttgtgtccctggaaaccccttagtcctgagaaaaccagggcagttggtcacccccctgttcaatgcaggcatcagttccactaggtagggggtcttagctgcattttaaagataaggaaataaagacttaatgggttggaataactgggttatgtgcacatagctaaagaatggttacacaaacaacttcaagtcaaatattagacctgcgtattcctaaaatccctatggctgtttgcaataacttgaggccagcctccctctcctcttttctaagccctctttacctttctgtgtcctctgatggctgttgtttatcaaggcaaccatcgtgattcatacctcaaagcacgctttgaattctactcctataggctccaaaacccttattatccaggttcagtattgctctaaactaggtgaggtcctgaacagacccagatttcaagcatattcaggtggatttgtttaacagagtgtggctactggaacatctggagcccaaagtacacaggaggcaggagagagcctactttcctgaagagagggacgggccaactgtccgacaatgaggaggtgggcattctttcctttgtaaaacaaaaagtatctgagacaggggtcagtcaattcagaagcttattttgccaaacttatggaccataacccatgacacagcctcaagaggtcctgagaacatgtgcccgaggtggctgggttacatcttggttttacatgtttgagggagactgaagacatcagtcaatacatgtgaggcatacattggttgggtccagaaaggcgggacaacttcagaggtggggagtggcttttaggtcatgggtggattcaaagattttctggttggcaattgg

SEQ ID NO: 118 - DNA, 1002 bp, Homo sapiens
aaaagtagcatcgagaatcaatttgcatctcagaattgggatccctgccctaatctctctactttatgcggccgtgtcctgcttttcatgactctagaaagcagaggagaaagtggatgtaagatataaattagtctgtcttgtagggctttctcttggtcccattctgggaccagccagtgtccatacctgtggcctttggtatccaatttaaggcagttcttctctttccatgatcacacagtaaaggagcccccgtatacagtgctccaggactgagtccagtttttagtgtagcgtgcaacaagagcagaaaaggcagagttgggaaggacatgtcaacgggcagcaatgaggtggtataaagaccctgggcatttggaggcaacagagggagaaaggtctgcttcaaggaccaacttggtctcttcctatctctgccctggcagcaccagcagctgcacattggcccttcttaccacttccatggcaaaaccaaggttttctctacctcgcctagccggcccctgcagacttgctgacacagctgagtgcggagtgcatctagaccccaacatgaggcgcccttctctcaaaacaaatgagccttcgaaactccagcaaacagtgctaatgaattgccctcggcttcttaggcatcattttctcgtaattataatgggaagaagacatggagtcccactgagaacgtggagctagcctgcccctagagcaaggcaaaatccctctctgaggaccacactcaagcagaactgatttttctaagacttagagaagaaacaaaatctgatttaattcttaggaaattgctttttttaacccacctgtgtaagcctgtatttaaatgctaatatatttggcctgccgggatgccacatttattttcttccttagcagcaacaaaaatcatttatttatgagaattctagctcctacctgctctcctgagttcctcatcttcatttccatctaccagctgga

SEQ ID NO: 119 - DNA, 316 bp, Homo sapiens
  misc_feature 284: n = A,T,C or G
gaggggtttttaagattgtgtgttctgaatggcctgtctctgactggaacccaactccgtccccagacccacttccatctttttctgtgagggggacacactctttcaacttttccaaaatggcatctaccatggcttttctgattaaaagcaaacgaaacacacccttcctataatcaaaaatttagaaaagcagcaaaaataaaaaggggataaggaagaaaacagaaattaaccaccatcccagccgctaaaattttgatgagttctcatgtgtttccttncagctgattgttgtttggcatacatttattaa

SEQ ID NO: 120 - DNA, 413 bp, Homo sapiens
  misc_feature 177: n = A,T,C or G
cacttccatctttttctgtgagggggacacactctttcaacttttccaaaatggcatctaccatggcttttctgattaaaagcaaacgaaacacacccttcctataatcaaaaatttagaaaagcagcaaaaataaaaaggggataaggaagaaaacagaaattaaccaccatcccnccgctaaaattttgatgagttctcatgtgtttccttagcagctgattgttgtttggcatacatttattaatattggaattaaaaatatatatggcactttatatcctagaaaatagtaatactgtaaatgtgttctagaaatgggagctgctgttgctcttattagagaattcaaacaaagaagggaggctcgctggggacagcttctgggggaggatgggtaccgctttgagaca

SEQ ID NO: 121 - DNA, 414 bp, Homo sapiens
aggtatgagtcagttgagtggggacaggtaatagagagctagaactggctggccttatggcctccaaggcattggggagccactgtacattcttgagcaggcaatgacttcacaaaaggatttctcaaaggttagtcctgcaacagaagacagcgtggattggactggaagagtgggagggcaggtggagaaggcattggtctgcaagtggggagcagccctgggggcccagccagtcccctgtgccctgacaagtggtatggcatggatggatggctctacttctgggccgccaggatggacaggtactggttgctcttcaccatggcgataatgaggaggccaccggtcagcaggaaggtgggccagaagagggagaagaggagggcctggggcccgtagaggcgctggaat

SEQ ID NO: 122 - DNA, 346 bp, Homo sapiens
ccccatccctccagttcagtacctgctggttctggtcccgagtgtcctccgtgtggtacagcacagcccacctgccggcagctgacacgttgacccacaggcatgggtactggggcaccttcttgcccttcagctctctcctggtccctgatgttggtctcaatcaggtggcacttggattcctgggtccacacgctgaggagaccacacacatgcacacatacacatctcagaactgggtgacacacagaacacccatttgaacccattatcccctgggagcctctagagggatccaggactgggctcctcatcttgtcttcagcatccagcaataaaggcacat

SEQ ID NO: 123 - DNA, 484 bp, Homo sapiens
  misc_feature 148: n = A,T,C or G
ttccctgcacttgaaccctagaacctaagaatgagcatcgtcttgaccctgctgccttgaatgagggtcaaggagaggggtgagtagaaggccagggttccttacagatgccagacccttaggagagggttggggggtgggcaggccnggagagctcagtaccttttctggtagaggggcagcacagtcgtgaccaggatgtagtaggtgatgacggcacacaccaccatggttacacccagagcaaagggctcgtgtctctccccgcttctgggccatcaccagcttcttcaccatattcactgggggcagtgatcatttctaggtccacagaagcaaacagaagtgagatcagcccagttcacaggtgatccacagaaagagaggacaggtgagaggggaaggtactcaactattaatatcactcttgtttatatttggagctttgcaacttccagaagtcttgctttttggaccccatgta

SEQ ID NO: 124 - DNA, 182 bp, Homo sapiens
agaggaagggagtcctcctgcctgcctccctccctgccccgtggcaggctgctttccccatgtctccctccagcccggtcttcagagaaatcacttcccaagtgctttcaggcccggtactcacagtcttcccggcgtcctgtgggtcttgagcagcagacagtttctttctgcctggaccc

SEQ ID NO: 125 - DNA, 146 bp, Homo sapiens
agcccggtcttcagagaaatcacttcccaagtgctttcaggcccggtactcacagtcttcccgggcgtcctgtgggtcttgagcagcagacagtttctttctgcctggacccccgcccccaccccaaaagaggccacagagcttca

SEQ ID NO: 126 - DNA, 146 bp, Homo sapiens
agcccggtcttcagagaaatcacttcccaagtgctttcaggcccggtactcacagtcttcccggcgtcctgtgggtcttgagcagcagacaggtttctttctgcctggacccccgcccccaccccaaaagaggccacagagcttca

SEQ ID NO: 127 - DNA, 1002 bp, Homo sapiens
cttatctccacccttcacttgacccaagaatcaaagaacctgaaactgagacttggaggcttgaagtcactggtgcaaccctaggggccagaactagattcgaagctggcccttccagatggcacagcttggtctgtctctgatgaccctggggctgctctgagacattaaaaatcacctcgatcatacagtaagctgccacctgaggctctggaggtcaccctgagtttccccagcccccagggaggtgggtgcagcctggccttccctgctgagcgagctcaccaccttcctccctcctgcctccagcaggcgcgaaatgaaggcagccactcaggcctccctgacacactctcaggcggtgagtgcccttctccacccctttcctaattgaatcttattaacaggagactacagtgtctgtttaatgggcaccatagcaccagagggtctaagaccagcttcagaccttgcaggcagattgacagagggatgtaggactctggaattcaatctcagaagagcaattttccaaggatgatcctctgtccactcagaagcaggaaaagtcctcctggggctaatccagaaatgccaggcccccctcctgcttccctgggggagagatacacagtgcaacaggctgccatttatgagtataaccgaagggctccttgctcgtgatactctgaataagttattaagggctacatattatttggaaatcataaacaaactttagcattcttcccaagggaaggtgggaacaaacagggaaggggggccgtggggtcttctgctccccctaaatgagccacaaccaaaaggcattgacaagccctgtcctcgagggtttgtgggtgaaaacccaggtcctttgctggctgcggggttgtgtgtgacagatggctacaggtggagggcaagaaaataacaatgctgcaacaataaatattgacggtttgcattagtacggggtgtcagagatcacaaaatatcttc

SEQ ID NO: 128 - DNA, 2002 bp, Homo sapiens
tacttttcagcctgaggtctcctcctcaccactaacacccttccctccaatcaaactgatccattgtacctacaaaaagcccgtcccacctcctagcctttgttcacactgggttctctgctggatcaccatccctccacatttccaggtgtccctcaagactactcagcagcagctatccatacaagttcctcaaccctggctttcttgccctcaagtaaccagttcatcctccccagtcatatagccctctatttacatttcttttctggaagctatcatttttcacgtgccatttgagtgagtgtcctcgctaagacgatattttctttgagggcagtaacctttcttatatgtctctgtatcccatgaacttagcaaaaaacaagggacagaacaggtgcaaagtctacgtggttagtgaatttaacagatcttcctaacgtgtaaacgtcgttgtccaggtgaatggaagaagtgagctgagatagaggggacagacagagtcagtgtccagtgctgacctctgaaatggaaaaacatggccagtccttaggaggctgcagaggccaagaccccagtgaggtttgggggttccacagcagaggaggagctgtggaccacagcaggaccccgatgccatcagcaggggaggaagtaatcagagaggtggaggaaggaagccaagggaagtcaagtaaacaccaaatattccctcccggtccaatgctgtgacctgcataagccaccactcccccagtctagactctacccatggaagaaggaagaagatagaactctggatttgaatataattctaaaataaccaaatttatctgaaaatgactaggctgagttttctgcttcaaccagaaatggagcttggagtcagaaattatgtgaaattatagaagagaaagtcaccatcttccatctctgagtcgtatgatcattttagacataaaattgtgcacttacgatgtaccaagtgcttaatatactgtgatctcatttcaccagggaaactgtataattcattgctttaactgacaaaattctgcaactgaagaaggtgctgttaataattgcattgggacgcaggcctgagcaggccatgatttgtggctgtcctacatctgaccctcacagtatccatgggagaaggcagcatgtttatgccccctgacagctggggaaaccaacacttaaagtgattaagtcacaagtccaaaataaatgacagagctgcagttcaagcccaggtggtcatttaccaaaggccatgctcttttcactttgcatgggactgtgaccgctggctctacccagcttcccagtgcgacccttccccgcccactgtttctcttctctggccaacggaaacacaatgagaccacatatgtaacattacattttttcatagccacattgaaaagaaaaaggaaccaggtaaaatccattttaatatgatattttatttaacccaatacagttgaggcttgaacaacacaggtttgaactgtgtgggtccgcttacacatggcttttgttcagtctctgccacccctgagacagcagggccagcccctcctcttccgcctcctcctcagcccactctacatgaaaacaaagaggatgatgatctttttgatgatccactttcacttaataaatagcaaatatatgttctcttctttatgatttctcgtaataacattttcttttctctagcctcatttactgtaagaatacagcatattcccagctactcaggaagctgaggcaggagaatcacttgaacctgggaggccgagtttgcagtgagccaaaatcgcaccattgcactccagcctgggcaacaagagcgaaactccaactcaaaaaaaaaaaaaataaaaagaatacagcgtataatgcatgtaacatataaaatatgtgttaatcaactgtctatgttatgggtaagtcttccagtcaacagcaggctattaggagttaagtt

SEQ ID NO: 129 - DNA, 1121 bp, Homo sapiens
cgctcagcagccattaaaaggatatcatccagtcacttagtttctcaatttaactttaaaggaaagttgccttattagagaagtggcctctatttcaatgtaatggtctttgtcacatcttccaatgtgctggcttagtgctgaaggatggggaaaggcagttttcacatattgcagccaccataccaccaaagaaaacaggtgcacttccaggcatcatttagcggggtaccacgattcctggttccagtttcctttttagaaaatctgaaagtaactttggggcatatcttttaaggagtactccaacacgactagtggacagaccctaaattaattgccaatcagctctgccttctggtatttacacctttatgtaataacctccacttgaaggtagatgagatctgtgacttgcttctaaccagtggaatatggcggaggtggtgggacgttactcctgtgattacattacatcatgtggctcctttatgatggaagattcatgctagagattctccttgctgacttgacaaagtatgtaaccatgatgaagacttccacgtggcaaggagctgtgggaagcccaggtgctgagactggcatccagcaaacacccagcaagaaacagacgtccttggttctacacatacaggaaatgaattctgccaacatcctgagtaaggctggaactagattctccccaagttgagcctgacaagtaaaatacagaccagccaacaccttgattgcagtcttgtgagacctggggaaaaggacacagctgaaccgtgtccattcttctgacccacagaaactgtcacatcataaaggtatgttagttgttacacagtttagaaaactattacagctgctcaagaaggttagctagctccagatttcaatccattcacaggaaagcaagctttattcctagaagaataattcatgctttgcaaaaagaggaaaacgtcctgcagttttagaaggtcttttctttctcaacacacccaaatttctttaaaatcctcaagaagtgcatttgttttcatggttgactcgaagaagtgagtataattaactcacaaaaggtgggaggaagggacaaattaaattttggt

SEQ ID NO: 130 - DNA, 1002 bp, Homo sapiens
cactcaaagggctggggacccttgtccctcccatgtgcatccatctctcctatctctgagtccccagtgaactgctgcctccctagagaaacagtgctagaagtcagtggcaagagcagcaggaggacttggagctacatgcagagtgtgagctccggagtcagaccagctgagttcaaggccagctccaccatctattcactgtgacttcaggaaggttgcttaacctctctgtgccttagctgcctcatctataaaacaggaaacaatgagagtctttccttatggggctattgaaatgattaagtgagatcaggcatgtgatggcacacagtaagaactccataaacagaggtcaccactgctaatgcaattattctatcacctcaggagactaaagcaggggaggaaacaccattgactcctggacatttacccaaggagattatggatccatgttttgcacacactttagaaagacaaggaattctaaccacagcagtctgtctccactgcccccgtcatttcagtctcacccgtccaccctcaacctcaccactgtggcccggaaatgcggttgcccagggccactctcaccccacctcagccctgctctgctcaagtctcacttccactccttccagctcccatccctttctacccagctccaccctgatttctccaccatgacctttaccctcctagtctgatctagacccctgatcttgccgagtatctaggactttggtgcctttgaccctcagcagcagaggtagagagggatctcggtgaagtctgggatgttatagtgacttgtttatctaagtgccctgagactgtgagttccctaatgcagggagcatcaacctctgcagagagccccagagccctgctcaggtgtgatgaacaggaggcactcacttgatgccctcacaaagttgtgagtgaatgaatgaatgagtgaatgaatgattgaatgaagattagtgattatgttaatga

SEQ ID NO: 131 - DNA, 895 bp, Homo sapiens
ggtggggggggagaggggaggggaggagaggggaggggagtgggggagaaggggagaaaagcgcagctggcttcctcactctcctttccttcctcaccatccttaccctggcccagggcaggaggaggattggcagagtagaggcagggtcttctgtcttagctgggcctgttggtgactttctgttggccaacatgggctgactggaatgttctccagcatggcacatggtcatccagatgcaggctcttccctggggcactatagcagagagggctctcttccagtctattgcagatggatgccctcgtgagctgagttttgatgaacatcccatgtccccagccaccccattcagagcctctttctactctggtcctctggtcccagcagcagccctctgggtactgaggggagggcatctcacccaagccccttaaacctgctcaccttcttcagagcccacgtggccgcaggaaagtcacaaacccttgtgctcccacagggcacacgtgtgcacacgtgtgcagctaccttctctctagttggtacctgaggctgcctcctggattttccagtctctgtgttcccagacaacccccaagccccaagaatacaagagctctgtcaccaagcatcgggcctgtggctgcactacacgtctgcagctcaggacccctggctgcggcgtaagctaccagcatccccttctcatgggcaccctcatctccggctccccatcgctgggctgtgacctgcgggggcgcccctctatggaagggaaggagaaaaattcacagtgctatctactcctctgaatgcactcccaccaatttccttggaaatttctagctttcactgacatatctgggatggggcggtggtcacaaaatca

SEQ ID NO: 132 - DNA, 735 bp, Homo sapiens
ctggctgggggaccatgggtcagggctgccaccccctggctctgtgccttcacctgtgtaacgaatggggcactcacagcccctctcaagtggtcctggggatgaagtgagaaggtgacatatacaagtgagttatacacgttcctgttctgtcactcaccagtgctcactgggtgggtcactgaactcccctcagcgtttccttctccatctgtaaaccaccagtgcaaacctttcccagatagtgctgacccgaagcaggaaccagtgcccctctgccctcagtaagtctgccagcagagggaagcccatagagggtcttgggaaatgaagccaacagagtcaagagggtcagatgatgagggacttcaagtgccaccttcatcccattctttctgcaaatattcaccacacacctacgtgacctcaggctctgtgtcaggtcctggggatgtaatggtgtccatgaagaaacaaggtccctgccctcatagagtggcctgacatatgcccgaggcagtcagcagccgagtgcgggagactcttgagcagagattgagtgtgttgatatctgtaggcatcagcctggctttgctgagtgagctatatcagagtggaggaagccagaggcaaagtccagactccactgatcctggattgaggggagaaggggcttggcggaagagcagcctgagcacctgcatctcactccaactggtgctgatttgttcccat

SEQ ID NO: 133 - DNA, 899 bp, Homo sapiens
tccacaggtttgattataaatgtgtgtattgaattggaatttctgttgaaattctgatcccttctagacaaagaaggtaaaaattgaaacatgtcaatggatatctaaatatcattactcactggctttatttgcaaatggctttccattgacaacagttacattttgttcaaagcaacaaatgattggcgctgacaatccacaggaacatggtgcagtcattaatgaatgtgctcattattcctccctgccgggaggcatcgactcccgttctccagcctgttttaagcagacagacctacatctgcacctgtcagcttggaaccctagtaggggagggggatgctgatgtgatggagaatgaagaatgggccctgcaggctgacattttgggagagtaggttctgaaatttatcccaaaggacatggaatcctggaagcagggttcaagatcctcccaaaattgatctcccaggatgcttggaatgattgttcctgagggttttgtaaaatgccaggggaaaaccaggaagcttctctccagttgtcttgcctccttcctctccagtctccatggagctgactttgagaattaactcctgagggacagagaccctgggatggagagccagccctgctggattccacaaggtgctgcttaaagcacaacacctcttcccaatgacaggttctgaaagaaggccttgtagctagatgcacagagggttttgttttgtttttttttttttaacctttcagcatctgtctaaaattgctctgggctgggtacagtggctcccacctgtaatcccaacactttgagagctgaggcaggaggatcgcttgagcccaggcgttctagaccagcctgggcaatatagtgagatctctatgtctag

SEQ ID NO: 134 - DNA, 445 bp, Homo sapiens
ggatctgtgcctgaagctgagctgctgcaatgaaactgacatttctgccttgcagcctggccatgggcttagctggactaaaatgctgctgcagtggtgagggcacgtgagagtccctaatgtacatggccttgctccttgtcctgacacatcttttagggctgctgctttctctagtgctggaatctagataattcctttcccagccgtttgtttcttcaatcttggaaaatatctggatgaatgtaacactgtcacacacagaacagaattatgacttacgtcacattctatgtcgtgattttgtggacttttaataattgcattacatttgtgaccattaatttccaccatcgccctgctcctgagaatctgtaagggacatttgacactcctctccccacccacctcaacatttgtgctgacctgaaggtcacattaaaaa

SEQ ID NO: 135 - DNA, 1002 bp, Homo sapiens
gcaactttccctggcctgcaggaactcagggactcaggggactaataacaacagtgtatgagcttccgggcacactgcttcccagtggcagcccctgtacttagggctttgtatgtattaattcatttactccaattcccacaataaccctatagggtagggttttattattgattacctttttacagaagaggagagtaaggcaaagagagatagagtagttttcccaaggtcaaagagcacataaatgataaaggatggatttgaatgtaggcagaatgaccctcaatacagactgttcctacagtccacgtcctcagccactagaccatacggccactgggatgatagacagaccactgcagccatggataaggcaaaaacagggctggctgtgttgatctgtgtctctcagagctccattcttcctcaagggggcaccttgcaaaaaaaaacaaaaaaatggggcagggtagggaactgaaggcaggagctcttcactagagcatagccacatcctccaggcagacaagaggacgcaggaggcaccattctgtgagagtatcacagtctgacccaaagacacagcttcacactgtctgatggcttgatggttaatgtcactctgccttttccccttctcaggactttgtaaccgctctgtcgattttattgagaggaactgtccacgagaaactaaggtggacatttaatttgtatgacatcaacaaggacggatacataaacaaagaggtaagtgagctggggccaggggtgtgagagggctccagtgaaggtaactaacccaacagaaaacagccccaggcatgaggatagcactgtctgaatgaggcaggctctgctttggggctaacagagctggtccctggcaaaataaagaaggcctccctcattgccctaccctgccctgttcccaagcgcccagaaaggattaaacagattcattctcactgggtcacctagattcagtagatattacac

SEQ ID NO: 136 - DNA, 1002 bp, Homo sapiens
tagggctttgtatgtattaattcatttactccaattcccacaataaccctatagggtagggttttattattgattacctttttacagaagaggagagtaaggcaaagagagatagagtagttttcccaaggtcaaagagcacataaatgataaaggatggatttgaatgtaggcagaatgaccctcaatacagactgttcctacagtccacgtcctcagccactagaccatacggccactgggatgatagacagaccactgcagccatggataaggcaaaaacagggctggctgtgttgatctgtgtctctcagagctccattcttcctcaagggggcaccttgcaaaaaaaaacaaaaaaatggggcagggtagggaactgaaggcaggagctcttcacagagcatagccacatcctccaggcagacaagaggacgcaggaggcaccattctgtgagagtatcacagtctgacccaaagacacagcttcacactgtctgattggcttgatggttaatgtcactctgccttttccccttctcaggactttgtaaccgctctgtcgattttattgagaggaactgtccacgagaaactaaggtggacatttaatttgtatgacatcaacaaggacggatacataaacaaagaggtaagtgagctggggccaggggtgtgagagggctccagtgaaggtaactaacccaacagaaaacagccccaggcatgaggatagcactgtctgaatgaggcaggctctgctttggggctaacagagctggtccctggcaaaataaagaaggcctccctcattgccctaccctgccctgttcccaagcgcccagaaaggattaaacagattcattctcactgggtcacctagattcagtagatattacacagtggataaaaatgacttgtttcagtgtgaagagttactcttccctagggaacctgcatttgggaaggttaggagccacaagtcaaagctaaaagttgaaa

SEQ ID NO: 137 - DNA, 1002 bp, Homo sapiens
ttgaaagagagcgctttggggggttttcttactgtatgtctctattgcatgttctgtattttacatttttctattatttcttctctgaggtatagtattgaatgtagaaaaatcctcaaatgttcggtattaagcaatacacttctaattcatggttcagagaagaaaatatctcgaataaaaataaaataaaaatatgacttatcaaaatttgtaggatctaaagcagtattccaggaatgcaaggttggtttaacattcaataattggtcagtgtaattaatcacattaatagaataaaaagagaaaaaatataatcatttcagtggatgtaattgttcagagcttcttaaaagaagcaactcactattttactagatgatttgtttcttctgaattcctctttaaggctacaggtggtgcttcttactttgaactgatcactttctaggtccccacccttacttcttgtttttcatacccttgtagagttttctccactataggaaacccatgcttgacatttgctcaccagagttacagagctctcagggaggagactcagagttctaaccctcttgccctccttttttcccaggacgacaacatcatgaggtctctccagctgtttcaaaatgtcatgtaactggtgacactcagccattcagctctcagagacattgtactaaacaaccaccttaacaccctgatctgcccttgttctgattttacacaccaactcttgggacagaaacaccttttacactttggaagaattctctgctgaagactttctatggaacccagcatcatgtggctcagtctctgattgccaactcttcctctttcttcttcttgagagagacaagatgaaatttgagtttgttttggaagcatgctcatctcctcacactgctgccctatggaaggtccctctgcttaagcttaaacagtagtgcacaaaatatgctgcttacgtgcccccagcccactgcctccaag

SEQ ID NO: 138 - DNA, 583 bp, Homo sapiens
ttttttttccccaatcatgctgtattcttagcgtaattttaaaatacttaaaacaagatcatgagaaaataaatgcccagattctagcaccaaaattcagaagggggggctatgagaatgaggggcggggagaagccttcctgagagtttctaagaggcatggaggcagtggggatagtgattagctctgggggaagaagaggctactggctggaaaagggcatgaggtagggttggtaatcacctacttgttttatctgagtgctggtcacacagatgtgttcactttaggaaaatgtattgagattacacttgtgatttctgcatttttacatacgcacattaactcagtcatatgctgataaatgtttaacaatgggtttgctggagaaaaaagggtcccccggatttgtaatgtctgcccatttccgtggtgtaaatactcccttcacaactgatttcaagcttcccatgcactgtaactgaagacagagttgggaagatacgtgcagtagcacaacattaaatcatatttccaccatatacacacaataggtgtaaataacacccagagcatagaaaa

SEQ ID NO: 139 - DNA, 621 bp, Homo sapiens
ggttggcagcttttaataacttagaaatggctgggggtgggggggaggaagtactgaatcatttactcattcagcaaataaccagggaatacctactctacactggtcactgatggagatactagacttgggcaaaagccgcgtcatctggttgtgttcaagctgaacattcccttgacccagtcactgatggagatatagacaggcaaaagccacgtcatctggctgtgttcaagctgaacagtcccttgacccagggcccatgacagggcagagggcatattattatccccattttacaaaggaaagagctgtcagacacagtgtcacacaggaaggtagacgataatgtcaatatccctcatcttagtataaagttgtccttaaaaactctccattatttattaatttattgactcacttattcatgttttctgcacagtgatacttatcctgcacgagactctcacaccagtgctttgggtgtaagaacaccccaaggattgtgttcccttttctcgaagagtctgtggtctaaggggattcaatggggtccactttccaaaccaagacagcaaaggaacactaggagagaagtattctgtgcagagattcagttat

SEQ ID NO: 140 - DNA, 538 bp, Homo sapiens
ggattaacaggcatgcaccaccgcacctggctaatttttgtatttttagtagagatggtgtttcaccatgttggccagagatggtcatgatctcttgaccttgggttctacccacctcagcctcccaaagtgctgagattacaggtgtgagccgctgcacccgggcaactggtttccttttactgccactttcactaaccgtggtatttctccatgggcagcattcttggcatttgggtgtgtaggactgtccctcacatagtgacctcttactcatgaattgccagtgtcacattcagattcttatggcaaccagaagctcccctgctcccagcatttctggactcagcctgggctggggaggttagctcagaccaaatatctcctttctgccagttgctctgctaggcccaggtcatgctgagcagagcaagatgtagctgaaaaccaaataagtcacgtgttccagcttgctggggttttgtgaagaaagcagccacccctccagtcatatagtttgcaggttgggatttgcatt

SEQ ID NO: 141 - DNA, 656 bp, Homo sapiens
tggctattgtcttaagctactattaccttcttgcttgtcaagttgcgcatttacttttcaaggcttgctacgtgcctggaatttctagattttcctttatttccatgcttggggagaggagtgcctggcaggctcctaagaggggtctgtgctccatctcgccccctatcttgaactatcggttgggtgctctagaatctgtatggggtggaagtgttcattcattttctgtacaaaagcaatcaatgcttattgtggaaaacccaaataagagagttgctctaaacaacaccctccccagtcccaataccttgtccagaagaaaccactgtttggtgagtatattagtctaatgtctgcagaccagatcggatgaccaagttttccataaatggatggccatccacttcccttcaagggcgagggtagtttgttctgatccatctccctgtttcacagctcagggagggaggaagacccaggaaggagagctgccacagttactagtggcccagctgggatttaaagtccgccgtgactgaagcttggctccacatgccagtctgcaaggccctgagtgccctcagcagtaattccaagcaaagcagggaagcagcgggccaggtgctgaactgaactgctgctcagggctcctg

SEQ ID NO: 142 - DNA, 579 bp, Homo sapiens
ctgcatatgttcccccaggtatttgcccccgaagcacagtcatctcactgccttgcatagtggaatgctaatcagcagaagacccttctatgggaggcagcttggaaacctggaggaagccctggctgaggaggctagtggtcagggagcctatcctggccaggtcacttttccccactggggcctcggtttcttctttgtaaagggagaaacttacattaggcatttcctcaggttccatttggttctcaaattctaatatttttatggttgatgctctcaccagagctgctgctatgatctcagagacgtgaggctcagatctaattagaagcaaccggaagagagcagttgggatttttcaactcaggaatcagtctccctgctgggttcaaattcaggctctgccacttacagctgtatgactaagccttgttttcctcaactataaaacagaggatagtagtagttaccatcttaaaatagctgttgtgttgtgtggatttcaaggatcatgcaagtcaagcatttagcacagtctctgctacataagtggtcagcaaatttgaggtactattc

SEQ ID NO: 143 - DNA, 985 bp, Homo sapiens
agacccttctatgggaggcagcttggaaacctggaggaagccctggctgaggaggctagtggtcagggagcctatcctggccaggtcacttttccccactggggcctcggtttcttctttgtaaagggagaaacttacattaggcatttcctcaggttccatttggttctcaaattctaatatttttatggttgatgctctcaccagagctgctgctatgatctcagagacgtgaggctcagatctaattagaagcaaccggaagagagcagttgggatttttcaactcaggaatcagtctccctgctgggttcaaattcaggctctgccacttactagctgtatgactaagccttgttttcctcaactataaaacagagatagtagtagttaccatcttaaaatagctgttgtgttgtgtggatttcaaggatcatgcaagtcaagcatttagcacagtctctgctacataagtggtcagcaaatttgtaggtactattcaatttatggctctattgtttggggcttccaaatgtccagagtaaggccattttcgaagtaggcagtacatctgagagccttaacagctcatttctggaaaccttatccagccctatccagataactaggaccaaaaaccccagcacacagatgctcgtcccttgcttcaaccctcactgacctctactctgtggcttgtcctgaaaacatcaaagcctgctcaattaaaatcctgaatgccttgataatacaatttagaaacatacatagtttttaaatagggcaaaaactctgcatgattagtgctgcaagaagatatccagcccaacctgggtgttcagggagcgctctctaaaggcaacagaaatctaaagtaatttaagagccatgccactgaataaaaatattcaggttcatttcctgtccttctctctgtttgggatctttgtgtgtctttaattaaaagtaggagagccctgctttt

SEQ ID NO: 144 - DNA, 597 bp, Homo sapiens
actacttctaaagcctcttagaccctggtaatcttcctcctaacaccatcgggtgactgcaaagcactgcaggccagacttcagttctgctgtgtaatttgcaagctgggtgaccttccttatctatagaatgggctctctctgcatggctggcatgaggaataaacaaaatggttgtgtccagtgcctggggcatagcacagctcaaaaaacttagttcatcctcctgagggatcaagaagatacttggaaacaaatgtccaagggcgtaatcttgaaggggcttgtgccaggcatatatggagagaagggttttgtgggatgtcagacttaatagtgccctttactccccacccccgtctctctgttcatagacaggaaatctgtggcctattctgggacctcaaagtgccacagggttaaagataccaagtcagaaatctaaggttctaaatggactttagaccatttttcatttgggaaggaagaattctttaaggggttgtgctggcgctgtctctgtatgcatgtgcagaatgtgcttccagatggggtaatggtctgagtttgaggacagaagtccactccactgcattc

SEQ ID NO: 145 - DNA, 988 bp, Homo sapiens
gggtgtggcctttggacagcaccttagcaggaatgtggtggagagcagccccattcactccagaggagagcctcaaactcttcaggcagatctagcctaggtagaatcttggcctggcccctccgggatgacaggtgccattgcccaagaatggggaaaaggctgaagtgctccagccaaagaccccaatttatcttcaggacaattttcactggaaaccttgcctcaccactgcccactttttcagaagtaattagaatgctaatctataagaaagatgactattaaaaataaattaataatagataatacattttggcttacaattttgaataatatagccatcccatcttaaagtaaaaattcatatatttttaataagcctgagacatgttttccaatgaaccacagatggttcatttttattatcctataaagagacattatgggcaagtgttttttaaaatggtaaaacagaaccttagagcagctctcttttgagagatctctaagcactttctaagcatcaggacccccttctgtcatcacagagactgaaatgaggagatggtctctgtcaccccctcactcaccagtgagccccagaccttcatccctgatcagatggaagcagtgtggcatgattacagttcatatttcaactctgccactcaatgactaatagccaagcactaataatgcagaaaatgtaaatttaaaaaataatcttcctgagattggttatgaaatgcactcaacacagcaccatccacagagaggttctttttaattgctcttttctttcctctcgacacccagaatcacaaagcatgcctgaaagcgtcacacatatatgtctgtgaccataacatggcattgcacatgcaaaggaaataaataggtgttacccatgtgacaaaggtccatgagctctgtccgcaaaaagctgttgagtttaaagaacaaataattctgaaaaatcttccag

SEQ ID NO: 146 - DNA, 835 bp, Homo sapiens
ctgccattctgatcactgcaagacccccacccccaatactcccaattgtaccaccccaccccactcaccagtgtctcagaaatgcctcctccagaaggaaggcatcctgtctaacccactgcttctagccaagctgtctttcttcagaaggtagaaaaagtattgttagtcattgtttaatctttattgagtatataccgccacaccaattgcactgccattcattatctcatttaaatctgacaagagccttgtaaagtagggattattcccaccatttcccagatgttgaaactgaaattgataaacacgacatgttgccatggctacatgaagatctccaagccggaggatctccaccctcacctgcctagcttcccagacctctctgcagaaaagggactgacccccaagacagccctggcctctgggctccaccccttccacatccatcccagggccgctgaggactgaagagttctccacgtttgccctttaaagtgacttaaaaataatctttatgaatttcttcatatacaaaatttgtacttactcattgcagcaaatttagaaaatacacataagcaaaaaagaacgtaacagccatccataaccctaactctcagagatcaccactattaaaatgtttattatctaagagagagatgatatagacaaagatgagacagattgacacagacaagatgggtacatgatagatattttctgtgttataacccttgctttttcttgcactttctagaatttttctgagaactaatctgaaatctgcacagggtccccacgtttggatcctctatcccattgccttcca

SEQ ID NO: 147 - DNA, 904 bp, Homo sapiens
agctgagccccagggctcccccatgagtggggaggaaactcatgagtgccttctatatgccagcgctctatctgcaggggttcttttgatagcagcagactgagagatgatgttactgtcccctttttcctgttgttggcaactgagactcagaggatggaagtgacttgctcaggtccaccacctcttcagctgtggagctgcgacaggagcctttgtttgacttcaaagctcaccatcactcctctctcactgatgctcaagtgggctatcacctcgcctttcctgagccttccttcgctatcctaaaacagcgcctcccgaaatcaccactaaagaacttattcatgtaaccaaacaccagcggttcccctaaaaacctatggaaataaaaattaaaaataaaaacagtgcctcccatgacccatgtctctccagtcccataactctgctctatttccattcacagctccatccccacctttatgtcttttgttcactgctttatccccagtgcctagaagagtgcttggcacctagtagacactcagtaagtatttgtcgaatgagttaataaggttgtgaaaagaacgttagattactggaaggattcatctgagtttaattctgctatgctgggaatccagtgtgcggccttggatgaaggccagttccctccctgggccccagtagccacatctgtacatttagagggcaggagaaaagccacacgctctgtgacttatacaacttgttgcccagagtggaggctgctttgatgctcagaaaaaagaaacaaacatggaaatgctaaatgggtggcagagagcttgagggaggaaggagatggggagggtactcttgaaactgtttggtgtcttccctcctgccccctcagtaccaa

SEQ ID NO: 148 - DNA, 862 bp, Homo sapiens
gcctgacagatttttactgaagggtgcacattggaataaaaaatgtgttacctatctggttgagtcttcagcttcagaaaggtaatagagcaaaggcagataaatccaaacagggactgagctgttttcatgcaggctgccttggtagctctccaaagccttcaaaaatgatgagatttttttttaaatcctttttatccaggttgttctcaagggattccacccctgcataggagagctcaccattcctgggatcttcagcttctatgcctttgcatatgctcttcccttgttccctcattcttcaacactcaactgaattatcacctcccttgaagccttctctgacatcccttctagtcccatgccacccaggaggcactaagagcttcctcccctcagctcccagttcttaaacatgtcaacactgttttgaaatgatttgccaatgaaaaattctagaccagcaaccaacaacatccttcccaaaggtgtgttatatatggtacatgctctatgtgctaaacaccaaattcattgataacagctaagaaccaggaaacaaaccatcgttaattatggcatctcttgaaaaatctaaagatctggactcactgggcttaaatgactgcatgataacaactggttgagtaacaactgtttccctttcatggagcagttactctccagttctcagttcctaccactctctatagttgtacactcatcatctgtcctcatctgaattacctgccaatgactactggcatttgagtttctaatccatggtctatgtgtatgcctcctcaccagtgtgagaactcatgtaaacaggtattatgtcttttcatctctctcctaa

SEQ ID NO: 149 - DNA, 1105 bp, Homo sapiens
ataatggtcacgttggagcaattgccatttcaaatcattaggaacactcaggtcactttggcatggagctattttgtaaaagacgtagaagccatttataaactttggtttgctttttaaaaatttatttcattctgaggcttatccgtgtaaaattaccaaaatgattgtggttagactctacattgtcacagtatttaaatgtgcacaatattccacttagaaataatgtcagtactaaaagtagtagagggctttgatagcaatattaatacatcgttaagcccttctcattaaacagtgtaatagtcttgttgaagtttgttaggcattttaaccactactaattaaaaatagacctactgactagtctgttttactgtgctttattgtgtcttggatgttcattcagatacttttgctgttgagaaatcaaatcgtctcttatggttttaattacaaaatacatattagagggatacagttcttagggctgtgatttttaatttgtgtaacctttttttattttggaaaggaaatttcagattttttctagtaatttttcatttgtgagtgttgttttctagatacagaaaatgtacctagatagatgatcacattttaggatattttgcttacgtgttattttatatttatatactataataccattgtatagttcagaacaagaaaatatcttgataaatcatctgctactgtgaggcagttaaaaaaatttgaggctcactgaaaatgtgtgacttgcccactgtctcatattgctagtattggagagaaaactagaatctaggcctttattttcctgatgtaatgattttagctaattattatttattttcttaaatcattgcattaattcgatttttcacaagtagagcctatatcagtgtttgcaataattaaattttaagtatatttctataattgtaaataaaatcctgacatttgttacaggatggggttttctttcatcatatttttataataaaaattaagcagttataaaaataaatagcctagtttttcaattggtataagctggctttattttatactgctaataaaggcacattatgttcaagca

SEQ ID NO: 150 - DNA, 595 bp, Homo sapiens
  misc_feature 550: n = A,T,C or G
cttatatattcattaattaataatttatattcacacaatgattgtagaaatgtgagtgtttcttagattaccaaacatctgtgaaatcgtgaaggagtattgaaatttagtaatttggtttggatctttgaagatattctgtagaattgttttccaaaagttacaactggtttacaatttttttcttaattgccattaacaagttttgaccctgagatgagaaattattcacaaatttcaattaaatactggaatgcttcatattttctgtactttaggacagggatccccaacccccaggccacaggttggtactggtttgtgacctgttaggacctggactacatggcaggaggtgagcggtgcgtgagaaagcattactgcctgagctccacctcctgtcagcgacagcattagattctcataggaggacggaccttattgggaacacacacaagagatctaggttgcggactcctcatgagactctaatgcctatgatctgaggtgggacagttttatcctgaagctcccccactatccgtccagngaaaaatttggtcccttgtgccaaaaacactggggacctctgctt

SEQ ID NO: 151 - DNA, 2002 bp, Homo sapiens
agggctgggcgtcccccgcccccaccgtgcagccctcgcccccgccccgcccctccgtagttgcccgcccgccgccccctccgccgccccctccgccgctccgactctcgccccgagcgctggcagcaggcagcaggcagcaggcgggcgcgctgtggctccgcgccgcgcggtccgggctctgttcattcatgattggtactcggccctccgagacccagcccgagcgcagggaggggagccgagtgtgcggcaggaggggcgggcggacggcggctcccgcaccgcacgcggcgctggctcggcagcctcggccgggcggccgctctggccccgtgtccagtgccaggcaggcttcagggcaccgtcctcggccctgggcgagggaaccgccgggccgggtcctcgcgcggggaagcggttccgaaggctcgcggggagcggctagccctgagtccctgcatgtgcggggctgaagaaggaagccagaagcctcctagcctcgcctccacgcttgctgaataccaagctgcaggcgagctgccgggcgcttttctctcctccaattcagagtagacaaaccacggggatttctttccagggtaggggaggggccgggcccggggtcccaactcgcactcaagtcttcgctgccatgggggccgtcatgggcaccttctcatctctgcaaaccaaacaaaggcgaccctcgaaaggtaagccaccttcttccttttgttcccctgtctgggcttgggggtgctaggcgccgaggtgggctgtgccacctgcctcccttagtccggactctcctctccacgaggagcccggacaggtgcttgtatccaaaggagagagaaatcggcgggagggctggtgtgaacacccagaggagggagccggagtggacgtctgccccagcggcaactggacccctctggggcaccaggtgtcgggactctcctcctggggaaatctctgagagccgaaggaagcggcaatgttcacaggtgggggtgaccggattctctggtggaagtgtggtgaagctcttcccattcccatgacagctggcgtttgagcactcagtgagggtgctgccacactcccacactcctcctaggcggctatgccaggtgcagacctgcgagtcccttcatcaggaagagtgctctgtctgcacccccaaaacctctgcaagccaaaaggaatcagctgctgccaggggtaaaactcccaggcctcatgtcctggtggctccgggagtcaggaggagcaaccgtgaagggctggctgcgagctgagcttacatcaaggattaaaaagcataatatcgtggagtctcttctgcctggacgctgttccttcaccacctgtccccagccgaggcatggctgatctcaccatccgtgggagagtcctcaaatgggtccaggtgaagttggaaccagtgtgttgggccctggaggacaatgcaggtctccttaccagcagttcaaaagttagtggttggaataaagagactggaagcagttaggaaacgggaaatgatgggttttgttttgtttaatgttcaaatgtcactacgagtggtaagattttaagcagcttgacacttaaacattcaaattctaccatcagagcccccatcctggatacaggtgggagttaagctcctaccctacaggcctgatagtgagtagaagtgtaatggggtaagggaccccaagtgaacaataagtctcctcttagaacttggttggtctcaccctgtttagaaccacagagatctccataagtaagctgtccttgaaaccccctggaagaaggggtcccagcttctggcccagctcccaggggcatcaggctggctgagccccgaggaaagagatctctgggtgcagatcttaggtgctgaagctgggttggcatttacatcctagaacataggaagaggctttggcccatttgtccagctgagttacatgtcctgctggcaagg

SEQ ID NO: 152 - DNA, 700 bp, Homo sapiens
tgggggtgctaggcgccgaggtgggctgtgccacctgcctcccttagtccggactctcctctccacgaggagcccggacaggtgcttgtatccaaaggagagagaaatcggcgggagggctggtgtgaacacccagaggagggagccggagtggacgtctgccccagcggcaactggacccctctggggcaccaggtgtcgggactctcctcctggggaaatctctgagagccgaaggaagcggcatgttcacaggtgggggtgaccggattctctggtggaagtgtggtgaagctcttcccattcccatgacagctggcgtttgagcactcagtgacgggtgctgccacactcccacactcctcctaggcggctatgccaggtgcagacctgcgagtcccttcatcaggaagagtgctctgtctgcacccccaaaacctctgcaagccaaaaggaatcagctgctgccaggggtaaaactcccaggcctcatgtcctggtggctccgggagtcaggaggagcaaccgtgaagggctggctgcgagctgagcttacatcaaggattaaaaagcataatatcgtggagtctcttctgcctggacgctgttccttcaccacctgtccccagccgaggcatggctgatctcaccatccgtgggagagtcctcaaatgggtccaggtgaagttggaaccagtgt

SEQ ID NO: 153 - DNA, 2002 bp, Homo sapiens
tcaaacttttcatttgctcaaagcctacagcaaactcagtccacacacttggctatacaagaaaggttgctttctttgttgttctataactgactttaatttcaacttcaagtccccattcttgccaaggggtagaaatggaatcttggtcaacttaggttcccctccctactctctggggttgcatttccaggccaggcagtttctgctggtgcttttgttccttggtcctcagtcttctttctgtgttgacatccattgacatgtcctcgactcccctcatctcagatcacaggcccatgctgactccaggagtattcttgtattctcttcatctgaacctcaacactttttgagaccacgcatgcatgtgctctctctttctctctctctctaacacttctggaacactcttggacatgaggagatattggtctttctaggatggggtcaactggccctgcctcagatccattggcctgtacatatcttgtagccattgtggtgccatggatcacaggtcacgatgctgtgtggctgcctctgctcttagacctgccccccatgccaccagagggagtgtctgcctccccctgccctggacactcagctggaggggagggtcacagtccctcacagtcccttctccagtgacaagcaacaaactcccagtcttcctttctttctgatcctctcctcctcttcctccttctcctcttcctcctctcccagtccaaggaagttttatgcaaaggccagaggagggaataatgaggtggaggtctctctgaccaagcatgtagccttccggatctgttgtgctttccaggagtccttcaaagctctaagcttttggaattctgcaagctcaggaaattgaaaaccttttctctcacaactgcaggtctttgtctgcagttgtaaaagtctgtttagaaactcaggagacaagcagcatcttctttgttccctgctttctggaggcagtcagcgtggaacaaccctgcctgcagtctgactcagggaaagggtcactgagtgtgtgtgtgtgtgttgaggggtggataataagcaaggagaacactcagacagagagctcacagaggggcaccccagcacctccctcacctctatattccccgcctgggcatagtggagggagggttaatgccagccaagtttaacaggcatttctgattcgcggcattgttgttgcgctatcctgcaatcctacgctgcgggtactgtttttatcctgatccttcagctctggaaactaatatagagagctgagtaacttgcttgaggccatgatgccaggatccacggtgcccccaggctgaagagccttaaccactgggctgtaccacctcacaggagggcaggtggcacagtgcctggaacttgggagggtccagcacgtggaactatgctctgtcatttacttactgtgtgtcactggatcagtcactcaacaccgctaagcctcattttccacctcttcaaaagggatctaataaacctgttagcagaaggctgctgtgaacactaaatgaggtggcttaggtgagagctctggtctgaagatgctcacactttgaatctcaagacttgtgtgaaccaatatcagatttctcctattagattgcaattctcagggagtcacattccgtctccaaatgcccatctcctgatccacaaaatgagcacaacatctctgataaacggtaactagatggttccagtgggcagcgggagtgggagggcggttgactgggccagaacctcaaatgtattcctgtgtagtttctcatgcattcattcagtttggcaccagaaggtgcccagactcactttgcagccagtctgtccccatagaggtgataaaggaaaaacatatgcacatttaaacttttaaaagtttatttgaacattcagcgattcacaaacggtatagcacagacagcaagcaactagcactcctctaggaggggccaaacag

SEQ ID NO: 154 - DNA, 2002 bp, Homo sapiens
acagaaatccttaagagcatcagccgtgacacagaaatctaatacaataaaacaaagtgcttataaaccccagagttgtttaaaacccagaaattgccaattgacatatgggactatatcttcttagcccctagtaaactgagtggcttcaaacaagtccctatcacctcccagggcctcagtttcttcacctgtgaaataagaggatcaaaaaaagataatgttctctctgttctcttccaaccgaggcaggcatctcaagtatttcttagtcagttctactctaggctacacagtatctgtatctggcagctgtatgaactactgttgaaaatcctcttcccaatcccagtttcaacatcactcctcaaggcagcatccaccttcactctagactgaattaattcctctgtcttaccacctaaactcctctagaaaacttgatagaggtaaagataaatgcattttttcaaaaattctacttttctagtcccaaggcattgtgtatatcattcttatgtaagttatcacaataaacccataattagttacttccatttatgtcaaatcgcctacaaagcagaaacatgtattattcatttttggcttcctccccagtatctagcatacgaactgtttgcaaacatgcccagttcttcaaactttgtaacttcatgccttttctatctactacttgggatgggcccaccctccctttgtcctctaagcacactcctattcatccttcaaagtccagcacaaaaatcccctcctctgttaaacttcaactgctccaggctgagtcttatgtttgggtccttcatacgtacccctcttctattgtttggggtattgtgtgctgtgggatctgtttactctcagttctcccctctaggctgggttccttgaaaaacaccctctggacatttcacctctacatcctctgcattcttggccaggctctgagagggcattggtaaatgttaactgcctggcaatgagtgatgctgttaacctgatgtgtcaggggtctgaataaagctgcctcaaggtaggcagatgcccacaaccaagcaagaactcaaagctgcaggctcctcagcctgaaccttagacagcgtcttggtcaccatttcaacaccttgaccacatttctcactctcccaaatttcctcctgcttattcctcatccacatacataaggctgtgtctcccaggggaaattcaactacttggtaattatcctgcttcttaagtttggggctaggggattcatagatgatgttcagtattatgctgtgcaatgtagatgcttcctaaaccttctcaggagctaccactgagtggcacctggggacctctcaggaagagccagttttctgggcagtgtggggcaggacagagctcattaaaccagcctaccacctgtcttccagctcctcctctcagcctctgggcttccagcagaaagcacacgagagcattcttgttggttttcttatgacttgagccagcgagacgtacatgcccagcacctgttacctgggctggctcttggctgagagcatacatgcattgggtcaggtttcagatctgctggaggaacacagccagaatgtcttgacaggcagccctggcaaagccccagaaaatataagatctgagtcttatgatggactctgtgaccttgagcctctcacctcgtgaccttgggcatctcatgttctctccacaggtctcggttctggactccttcatgggagctgtcatgcccctgtcacacagcagtgttgtgcccccggggatcagggaccaggatggtcctttcttggtggtgaagggggcattttgcatattccagagattcaagtttccagacctatctagaaagaaacatttgagtttacaggttggcgcttctcagcctctgtctctcttcctctctgttcatctccctctgtcccctctatgtatgtttgtgtctctttctgtctcctctgcc

SEQ ID NO: 155 - DNA, 2002 bp, Homo sapiens
ctcactgcctgcagtttattcaggcattggatgagacagcttcttcctgctccatgtggagtcagctgggtacttgaactgggacatggatgatctactttcaagatggcttattctcagggctgccaaatggataccggctatcagttgaaagctataagcaggggcactctgcataagcatggctcatctctacaaaagctcctccccagtctccttgtttgggcctcacagtgtatggtaacctcagggcagtcagaatgtgacaactaaagacttcaggagtaagtattccaggaagcaagatataagctatgtggccttctaagacctagcctcagaggtcacatagtgtaacctctatcacaccctattggtagatattgtaacagaagcccacccagtttcacagatggggacatagactccatttcttaataggtaactggccagagttgtaaaagagcatgtgggatggaagatattgttgcaagcatctttagcaaatacaactggacatacccaatgcaagcacaggattgatcctccactctgcccccataccccatgatttattagccactcggacaagtgacttcaactctccaagcctctgtctcctccactaaagtggggacaaatgagtattacaaatgagaccattaaataagataatacattttaaaaattaacctggtacctgtcacaaagtacatgcctaacaaatgtttgcttctgtctcacttcctcaatttcatctcagtcaacctggactgactcaaaatggcattcttcttggctgccccctttgaagtatttctgctgagaaaatagtttctgtgtatttgtaaatttacaggttgaacatagatcattattcaagcattgctggtcgattcgtcttttcaaaggcgggagctgctggctgtgggaagggacccagcaggggtctcttgcaaccctgctctatgggtgggggaaatctggacctccctctggtaggggttgattgaagtgaagggtcaccatatgtctttcccaagagggtgactgacttcctgctttggtcccagtttccctgagattttcctgaaagcccttccggctagcccagttgggagtgttagtacatcagatcccatgctttggtgaaaaatgtaaacacagacctgatttttcattttaaatgaagccaagcatattgctcccagcagatgccgagtgactcaatctgtcctctcggttctgaagggaactgaagaacaacatggtaaaataaagcaaacagcacatttattggttgataaaatgctgttttagtctaccctggcattatatggtgattgctatgtggcgaacatctgttattaaatccagacttctgttgcctggatacattgagtcaaaagctggagcggatgagaaatccatttatgcgtctgttgcgtgtgaatgtcagagctcatatgatgcctttgtcttcattctaactgaatcttttaatatggaccgtctcacttgttaattctgactcaggggcaataatgttttcatttgattaaaaaaggttaaagaaacaaagaaacagtgttttctcaggtgctctaagtaattctgttaatgaattttcggagacagcgtgtgaatttgaaaagagtaggactttttaaagagttcatactatgaacccaataattcagatcctagggccttatcctaaggacataatagaaatgagcacatttataagaacaaagatgttcaatgaagtgttacttacaacagcaaaaaaacttgaaagtcacctaaatgtttgtaagtcaagagcttcattgatattgactgcaaagtccatgttattccatgtgacgaattttttaatcaatcacctcttgatggattttaaattttttacaattttttgctatcctaaaaaaaatgtgtcaatgaacaactttgaactaccctgactaccactttaggatagattgctagacgtgga

SEQ ID NO: 156 - DNA, 2002 bp, Homo sapiens
atcaccccaaatagttatgatgaaggtgatctatgtacgacacttagagaatcagtgatggaaaattcaccaagaacagccacaggcaggccagaagaatggccctgcccctctacttttaggattaagcagaagctggccctagatctcaccagttaccagtgatcttgggcatttttagcatcatgtgcattgcttcactgtgataccatcttgctggcacagccatggaaagccatgagttaatgcatctccccatgtaacaaacctcccctaggactctggtccacacctatctctgctagattctctggcattgcaagaaattcttcagactgccccaagagattcgttccaatctaggggctccttatccccagctcagagctggatttggctcttgcttggaggcgggaagccctgctgggccagggcttagaggggctcacaagaaatcaaagcaagcattctccgcctctctcctacagccctgcatgcatcttctctgatcccttgcctgagtggggggtggcattccaaaagctcattactggcttacatactttgccttaaatcagctcttaaatgccctgggatgaacagccctaaataggaaagaaaaaaaaaaaacaagtttcttgcaagttcacagatatgcttggtgctttctgtcaggctagggtgtagccttctctgttctaaatttgattttctgagtctttaaggaaaaatggctactggtcccctggacgctgattgcttcagcatctgaatctgctccatcacttctacctccacccactggtccacgtccagtgggtagaggtaaaggggatggagatatcatttatcttcaaaggataaaactgctctgagagatctttgctttcttagaaacactgctggaaagttgtttctttagactacattaacagaagtaccatctctaggaagacaaggtggtaataactaacatcaaatgagcagttcctatgtacccctgtacatgtcttagccaacttcatccttgtaacaaacctggaaggcaggcactgttatcactcttattcccaggtgaaccagttgaggttccaagaagtcttttgtgcaaggtcatgcagagttgaggcccccaagtcggtagacttcaggagccagaccctcaaccccctcactgcctcccgcctcatgctgcactgagcagaccatacccggatggtcatgttcaggttggctatcaatgcagaccacgctgggcatattcaggggacggatactcagaactatataacataaggaatagaggaaggactggaggatgtattaacatgaagaaaaggtagactcatggcaggagatgagcagggtaaagaggtgcaagacataaaaagccaatttcatatacatgaagatttatcaagagccagaaggccctctatgggtccaagagttacaaggcctaatgaggtgaattaatgccagcatataaggaaaagcttttgaatactcagaagtgtccaaaaaggggtcaggctgccttggaaagtagtaagctctccatcagaggcttggcaacttcttattagggatggtatgagtatctcaagtacagatacagatgacccaaataaccactgaggcacttctgaccccaagtataagagattctattgtaacgcacaggagtccatctcaagcagcacactgagccatctccttgataaacctaaaggtaggtattattcctcccagatgctgtcttcttagcctgggatgcaaaagccataggatcacttcacgtccaacccccatcaggtgatctgtcatgaatcacaagttattggagccagatggaactacagagctaaaagatacatgaagacaccgaggcctgcagacagggactaactttccaaggtcacagagctaacaagtgtcagagtcaggctagacccaggactcacaagttgagctcacaattagttccacttcctacaccacc

SEQ ID NO: 157 - DNA, 925 bp, Homo sapiens
cctgagcctctgcctccttctgagaaagacccttgtgattacatcaggttcacctggataattcaggataatctcttcatctcaaaatccttaagttgatcacatctgcaaaatctctcttaccatgtaaggtaacatattcacagcttctggggattaggacatgcatccctagggaaccatgattcaacctagcatgggggaacccactacaggcaggtgttgtccttgccatcgccagctcagtgcttggcacagtagaggccatggatattcattcagagagagcatgcactgaggcaagcctgacctcaagatcaagacaggaaattggctttcatgggttaaggacctgttactttgctcatcaatgtatccttaatcatcagaggtcagatctgctggagagtgcaatctttcaggtttccaaaagtaagactggatgccttagaacttaaagtcagggaggtacccaagaaagcaatcatagactgagtccccatgcagtgcactttctcggatggacaatttctctgttctgacagtcactgttgactccatttctcagatgagggaccgaggcacagagaggtgcagtcagtcacctgaggccacacagtcaggaagtggaaatccatggaaactcatcatcagctgcctcgcatcagggccagtgctctttatctccaccccacacattataaagccactcagctttacactcaagggaacttcctatttccctactggattatatgtataatttgtagtattgcaagatttgaacagaagcgagcagcagcttgtagttgtgtgtgtcactcactcctgcctgtggggatgccacgtgattgtttaaagggttggaatcaggagaaaggcaggctcagagcaggaccaagagagagcccacccctcgcctccc

SEQ ID NO: 158 - DNA, 1383 bp, Homo sapiens
attataagtatataccacactttgtttatccattcacttgtcgatggaaatttgggttgcatccacctttttttgctattgtgcataatgctgctatacacatggctgtgcaaatatctaatattagtccctgctttcagttcttttggatatgtatccagaagcagaattcttggatcatatggtaatcctatttttaattcttttaggaactgccatattgttttccacagcagctgcagcattttacattcctaccagcagtgcacaagagttccaatttctccatatcctcaccaacacttgttattttctgttgctgctgtttgtttttttattaatagtcatcctaatgggtgtgaagttgtttctcattgtggtttgctttgcaggttttgatttgtagattttcctgatgattagtgatgggtgcatcttttcatgttcttactgaccttttatatatctttcttggagaaatgtctgttaactctactcatacttttgtaaatagtattcccaatccttctaactccccaatgaggtggatattagtatgttcgtgttacagtaaagccaactaaaccttagaaagactaggttatattatccaaggtcacacagctagaaaatgacacagcttgtattgaaacatcagtttttctctttccaaacctaacgcacatttcatgaaacctacattattgcaccataacatcatgttgatttacttatctgctctcctgcctgtcccatctactacataaattgagtgtggtttgaaatcagagactacttctcatctttggcacagtggcagccatggatcagaatctcttacatgctggataagtggatgcaagctcaaggccacacctaaagtccccaggtgacttgatcacttgagttagctgctggaaacctgggcttcctcttctgcaaaatggggagagaaaataaattctcagtggattgtttagaagatttgagcaaagacctctgcaaagtgctaagcatgtggctagcatgtggcaggtgctgcctaaatagtagaaattaacactgccatgcttataagctccggacaaacacaagaagcccgaaacataatctgtgccttctgcttgcattcctcctagttggggatgtaaaatagcccagctacaatcaaagaagaaaatcaaagtcagcacagactatggatatgcttctatatgtgtagattatttccagactcattcggaagaatctggacatactggttgcctcagaggtcaagaaaattggctcatttacttctgtaacttaatttcgactctctatgcttttacatagttggaatttgccatgcacatatactacatttaaaagagcgtgtacgcg

SEQ ID NO: 159 - DNA, 910 bp, Homo sapiens
cacaattatgctgtaggtgagttttaccttgggaaaccaaggcacagaatttaagtaacatattgaagctcatgcagctgctaacagggaaggccagggtctgaacccagctgatccggctccagcatccgagctctgaaccactggtctatcctgcctctgttaggacttggtccaatgtcatcatcctagaaggaacatttaggcccgcacggtgggtggctggttcaatccagtttaaaggccaggagcaggacagtgacttgcagctgcagcaatcctatgactcaaaccaaagcagctgtgacaaataaagggactgactctcattctcccgtgctagggaaggatgagctatcaggccttgttgcaggctgagtcagtcatcccacaaaccacctaagtgaaacctcttcactgagccttatttcctgagcgctctccctttatctgtgcttgcaaagaggctgtctccctccatgccagccaacccacccacccccgcacacacataccacctctggctggaactgacgaccatgggttttagaaatgagataaatctgggagatgaatgtattcatgagcccataaaggggtcatgaatcactggccccaattactgccttcaatcctgacaggatgaattccctcaagcagattctccttgtcagacaacacgggaggcagtgtcatggctgatctagagccacagataacatcattattccataccaggctggtttcggtttcccaagccacctccacttgatttacagctcacttctgatgctggagagagagataaatatatatatatatatatatatatatatatatatatatatatatatgaaagaaagaaagaaaagagagagagagaaagacacaaaggggaagctttcatgcc

SEQ ID NO: 160 - DNA, 898 bp, Homo sapiens
atcccaataggacacatgttgtattaaaaagccatgcgagacggaagaaggaaattgaatgaaatttgagggcaggtaggagcagagacaataaataattcagcagtgaaggaagcagaaaaaagattgcactcatttcgcccttcaacaattatactaaacacctgctctgggccacagaagggccagatcccattcctgtgctcaggaagcccacaggccggcagggagaggctggttggaatgtgtgctttgcactgtaacggaggcatcgagcatggtaagggactggcggtggctgctgcctgcggacgtcgagcaggggcctttgaagaggcaggacctgtctggagtcttacctgggccttggccctggcaatggggaatggagcaggcagcaggggacagatgctgccagaagaccgagatggtgccggaggactgggctgagtctgggtcaaatgacaccgccccaggctctctgccctctggggtgaggcaggaggctgcctctgtgtgtgattcagagaccctagaatcccagtggccatcaccccacagcacatgccaacctttctgtgataactttctcttgtggaactgtgaaagtgtaagaccagctcctgtatagtgcatggccatcctttgctttggggacagtaagtcagtcaacacatacttataaatggggtcctgggccgtggcactgatctggtcctcccaccttgcctcacactgcccttcccactcaccacttccctcctctgcatcttagccgcaagggactttcagaccaagcagacctggaatcaaatcccaccgctgggcctcaatgccagtggagacaggaacagctgatccctggagccctcaggaggaagaggacgggatgcctggc

SEQ ID NO: 161 - DNA, 2002 bp, Homo sapiens
cccactcaccacttccctcctctgcatcttagccgcaagggactttcagaccaagcagacctggaatcaaatcccaccgctgggcctcaatgccagtggagacaggaacagctgatccctggagccctcaggaggaagaggacgggatgcctggcttggctgctggtctggggcaggtgcccagttacagcagttggaaaaatcctcagtgttggaaggaaatttggaagtgagcatctacctgcctgccgtgcagtttgtgacttttaagatggttgacagaacattcccaaaggaccacagcggtgaccactgttctcgtttccctttggtggctcactcactcagtgctggacacagtggtcctgacaagacagtgctgtggcttccatgaacctaggacagggatagactcaaggactaagaacaaaccaggaagaagcatcaccacaggctccttgccagtcacctcatctcaccctcctggccctggcggatgggtctccatatttacaggggccagatgaaaaaaccagaggagccaggaaaaggagcttccccttcccaagggcgcaaggtgaggtgccagtcatgagatgcaagccctgagctttctgattccactgcatgtggtcccaaggttcggcgccgcatcacacagttagtgagcacactctcctcccctggccccgagtgagccagctggatggcagatcagaaagagaagtcccgggtgcccccaacatggctagctccttccaggaccaggggctaggccccagctaaggctggtgcacacagcagggcagggggcgaaggagtgggatcccacccagggatcccacccaccccaaacctgctttcggacatctttccaatgcataatgtgcagatgaggccctttgataaggaccaaatccctttccgttgcttggcaacctggctcacaagtcatagcagggaagtaatttacaggaattcaaagtgtcgctggaggttcgtgctgagctgaattgctgcaaagaggaacctcaatggtccaaatcacacctctggcggggaggaggggctgaaggaaaagcttccacttccgtcacttgagagtacagagccctgagctcagactcagcgatcgttttccattaacggatttactggttccatgttgagctcctgctgtgtggcaggccctgtgctgggagccagggacacagtgacaaacgagacagatgccaaccccggatgcacagagctcaaagagacagaggagtaaacagggctacacatgtgacaagataggctgtgcacaggggtctgagcaggacccttggggcaggaggaggcagtggagggatgggagggtagggacgcagtggtgaccagctagccagatagagaacagagggtgtcccagcacagggccacacaagcaaaggcagaggtggggagagaagagcctgccacactctcagatcaccatgtggttgggccagggccccagctgaggctgaggacacatggagcccagatccggcagggccttgaatgccaagtcagaaagcatctgaaatttagtctacagatgatgtgggttattgacagccaggacagggaatgacatttgtgtttcaggaaaaccactgtcttcactgttagggggtagattcagggagaaacaggaggtggaggggaagaaactgtgagtaaaggagtctctggggtacaggtgaagtttctgtgaaactggagaagaaaactgttgaggcaagagttgacaaaacttgaagtaggatggagaggaagggacaagttcccctggcatggtgacggcccggtggtgggaaccagggaagaggaggggctttgcaggtgtctgacttgcccaacaggtggcgccatttaccaagatgggaagggccggggagaagggagggttccattctagggaaatctcaggtcctcgctattaggattctttcggttgccagtgactgaaacccag

SEQ ID NO: 162 - DNA, 1002 bp, Homo sapiens
actgtctagatctggggaccctcccaagctctcagagctttggaaggaaggtccctgcagggaaactgtgtgtgtttcttcaacagtgtatcctcagtgcctagcacatggtaagtgttccataaacagctgttgaagagacggatggataactgaatgaatggatgcttccatgggcaatgacacactaatctgaaaagccctgtatcaatgaaagaatcacttaatagtttaacttttccctcatccttcagaacacagatggcatgccatcttcccttcaaatctcttcccagtgccccacacagaagaggcacacttggacactggtgtctgatggacccaagttcacagcctgtctctggtcatcaggtatcatgaccttgggcaagaagcttaactctctgagcctcagtttccccttctgtcccccagggaaaatgagtcctgcccctcctaagggaggtatgagatgtaagaccccgaaggacacaaaggttctgccaggagccttcaggtaggaggcaggtaaggaggtctgctagattggaatgagtttctggaaggccccaaggagctcaaaatcagacctggggtgaaggtgtcttgaccaaaatgagacccatcaaagaagcctggatgaaggtgcccacagcatccatcagtgccaaaaacagaaacactttagcccaggatacaaggaacattttaaagcaacagagataagagatagttagaactcaggcctcctggctcttgctgttcttggcccataattagttgttatgggaccttaataaacttcttgccttcttggtacctttgccaaacaatctgatgaggagaatattgagtcatggtgccagggaaaattagcatattctgcaaattcctggcactgttaacactggattctgtccacctttagaaatcctcagatcactatgtcagcatcccccaatcacagctctccaacttcaaggagggttgaggggtctgaag

SEQ ID NO: 163 - DNA, 1002 bp, Homo sapiens
aagaatatcagttccacttcccttgtccctagagagccttgtagtggatgttgatgtgtcttccaacacatgcaccaacctttccctgtcctgtagcagttgagatggaatcatcccactcccagctccaggaataggctctgatgggcttgaacccagcagcttaattccattggttctctaggccttcatcattagtacaggaaaggcacttgacctaaattagttcgataagatttaagctcagaaatctggtttgttggatggagaaagagatgctttctttctctctggaaggagtttattgcaaaagtaagggctggggctgctacagccattgtgctaccatgagggaactagccatgataacaaaacttgcctggggaggggctacgcatcacagaaaatgatgccaaagtcctgctcaaactgtgcctgatgcctgcctgatctatggacttcttagttccatgtaatggattctctctatttttaaagccagtatcaggttgaatttttggagaaataaaacaaaaagcatcttgactaatttaaaaaatcttctttgggtattcaaccctcctaaactcacccccaaatccactgggagcatgtcaagatttttgtgagccgatttaggagatgcaaattcatttgccttaattggatctccaggaaatgacttctgccccctcttaaatcatttaaagctcaaagaggcatgagggccctccccaaggatgcaggtatcctcttgactgacagcctgtatgctctgcttccaggatccttccatctcctccctttactgagggagtctgctatgtgttagaggtgtccatcactggtcacactgggaagctgtggcagggaagctggagaaaaagcaagataggccccagaaagaacaccaactccagactcagggagactcaggccagaatcctagctcaacttcttccaagctcccaaagtcacactcttttctctgagcctcgattt

SEQ ID NO: 164 - DNA, 957 bp, Homo sapiens
atcccactcccagctccaggaataggctctgatgggcttgaacccagcagcttaattccattggttctctaggccttcatcattagtacaggaaaggcacttgacctaaattagttcgataagatttaagctcagaaatctggtttgttggatggagaaagagatgctttctttctctctggaaggagtttattgcaaaagtaagggctggggctgctacagccattgtgctaccatgagggaactagccatgataacaaaacttgcctggggaggggctacgcatcacagaaaatgatgccaaagtcctgctcaaactgtgcctgatgcctgcctgatctatggacttcttagttccatgtaatggattctctctatttttaaagccgtatcaggttgaatttttggagaaataaaacaaaaagcatcttgactaatttaaaaaatcttctttgggtattcaaccctcctaaactcacccccaaatccactgggagcatgtcaagattttctgtgagccgatttaggagatgcaaattcatttgccttaattggatctccaggaaatgacttctgccccctcttaaatcatttaaagctcaaagaggcatgagggccctccccaaggatgcaggtatcctcttgactgacagcctgtatgctctgcttccaggatccttccatctcctccctttactgagggagtctgctatgtgttagaggtgtccatcactggtcacactgggaagctgtggcagggaagctggagaaaaagcaagataggccccagaaagaacaccaactccagactcagggagactcaggccagaatcctagctcaacttcttccaagctcccaaagtcacactcttttctctgagcctcgattttcccatctgcaaaatggggatactaagggtcacctagctgggctgccctggagattccaagacatta

SEQ ID NO: 165 - DNA, 1002 bp, Homo sapiens
gggtcctaacaggccacagacccatccgtggcccaggggattggcgacccctgtctttttttttttcttttttttgagatggagtttcgctcttgttgcccaggctggagtgcaatggcacgatctcgactcttcaacctccgcctcctgggttcaagccattctcctccctcagcctcccaagtagctgggattacaggcacccgccaccatacctggctaatttttgtatttttagtagagatggggtttctccatgttggtcaggctggtcttgaactcccgacctcaagtgatccgcccacctcagcctcccaaagtgctgggattacaggcgtgagccaccacgacctgcccggggacccctgtcttaaaccaccccagcctgtgatactttgttatggtgaccctaagaggcaaatacaccctcctttccccaacctctcccctcagacgaaaccgatgcgaaaagtgcttcatgaagtttcaggtaaagaagtcgtgggacgaaaagggatagtgaggatggcgggaggggctgaactccaaatgggcttatcaaggctctgcaaaatggcgtgacggcgctgcccccttctggtggcctgaagactaacgcacatgatgtcaagtgcggggcccaagtactcaggaaaaggttctcatttggacactgggaggtcttacattgggggccctgagcctccagcccttccaaatctattctcagcaggagctcagccacacctgtgtcccagaactgaggccaggcccagccttcactccacgcccagccagccccaaggaaccgactccctgaggctctatgctccctgcctccagtggccccgtgtctgggaaatagtggccctggcctgatgccctgacctgggcaatccatcccctggtcctctcagctcccgggcccaggttttctgggctactttaaccagggcaaactcattcctcgagtacaaaataaaagattcgaacagcataatc

SEQ ID NO: 166 - DNA, 2002 bp, Homo sapiens
ggttagtgggatgcagcgcgaggctaaggagtgtctggggccaccagaagccagggaagcctaggaagggttttcctagagcctttggagggagcacagccctgctgacaccctgacttcagactcccagcctccagagctgggaagggataagtagctgttgctttaaaccagtggtccccaacccttttggcaccagaaaccggttttggttcagtggaagacaatttttccacggacagggtgtgtggggtgggagatggtttcaggatgaaactgttccgcctctgatcatcaggcattagcattagttagattctcataaggagtgagcaacctagatccttcgcatgcgcagttcgcaatagggttcatgctcctatgagaacctaatgcggcggctgatctgacaggagcggagctcaggcggtaatgcttgctcgccagctcacctgctgtgcagccggggtcctaacaggccacagacccatccgtggcccaggggattggcgacccctgtctttttttttttcttttttttgagatggagtttcgctcttgttgcccaggctggagtgcaatggcacgatctcgactcttcaacctccgcctcctgggttcaagccattctcctccctcagcctcccaagtagctgggattacaggcacccgccaccatacctggctaatttttgtatttttagtagagatggggtttctccatgttggtcaggctggtcttgaactcccgacctcaagtgatccgcccacctcagcctcccaaagtgctgggattacaggcgtgagccaccacgacctgcccggggacccctgtcttaaaccaccccagcctgtgatactttgttatggtgaccctaagaggcaaatacaccctcctttccccaacctctcccctcagacgaaaccgatgcgaaaagtgcttcatgaagtttcaggtaaagaagtctgggacgaaaagggatagtgaggatggcgggagagggctgaactccaaatgggcttatcaaggctctgcaaaatggcgtgacggcgctgcccccttctggtggcctgaagactaacgcacatgatgtcaagtgcggggcccaagtactcaggaaaaggttctcatttggacactgggaggtcttacattgggggccctgagcctccagcccttccaaatctattctcagcaggagctcagccacacctgtgtcccagaactgaggccaggcccagccttcactccacgcccagccagccccaaggaaccgactccctgaggctctatgctccctgcctccagtggccccgtgtctgggaaatagtggccctggcctgatgccctgacctgggcaatccatcccctggtcctctcagctcccgggcccaggttttctgggctactttaaccagggcaaactcattcctcgagtacaaaataaaagattcgaacagcataatcaaataggtcatacccataaatcaacacatttgagcacctattttgttgttctttcactaatccaaaccatatttattgagcatctactatgtgccattctccagtagccattctaggtgcaggggatacagcagagaccttgaaaaaaggaacagtctctgatcttgctgagcttagagtcaagtggaggtgaggaggaaggaaatgaattaacaactaagtgaagcagaaggtaaccaattgattgactgacgaaggggtacaaacaacaaacaccttcctttctccaaactctatctttaactgtattctctcgttttccttcctctccattttacaatcattttacaacatctctggctattctcctatatttctgatcacttcggttctcatcacaataataatttcagttttcaagcattggaaagtcccatccaattaaaatgtcaatctcacacgcagtttaaacgtttcgcctgcccgtgagctcagacctgtcttggtgcctcagttcttgtgtggaggggagga

SEQ ID NO: 167 - DNA, 1002 bp, Homo sapiens
tggtggcctgaagactaacgcacatgatgtcaagtgcggggcccaagtactcaggaaaaggttctcatttggacactgggaggtcttacattgggggccctgagcctccagcccttccaaatctattctcagcaggagctcagccacacctgtgtcccagaactgaggccaggcccagccttcactccacgcccagccagccccaaggaaccgactccctgaggctctatgctccctgcctccagtggccccgtgtctgggaaatagtggccctggcctgatgccctgacctgggcaatccatcccctggtcctctcagctcccgggcccaggttttctgggctactttaaccagggcaaactcattcctcgagtacaaaataaaagattcgaacagcataatcaaataggtcatacccataaatcaacacatttgagcacctattttgttgttctttcactaatccaaaccatatttattgagcatctactatgtgccagttctccagtagccattctaggtgcaggggatacagcagagaccttgaaaaaaggaacagtctctgatcttgctgagcttagagtcaagtggaggtgaggaggaaggaaatgaattaacaactaagtgaagcagaaggtaaccaattgattgactgacgaaggggtacaaacaacaaacaccttcctttctccaaactctatctttaactgtattctctcgttttccttcctctccattttacaatcattttacaacatctctggctattctcctatatttctgatcacttcggttctcatcacaataataatttcagttttcaagcattggaaagtcccatccaattaaaatgtcaatctcacacgcagtttaaacgtttcgcctgcccgtgagctcagacctgtcttggtgcctcagttcttgtgtggaggggaggagaggagaggggaggggaggagaggaaaggagaccggggaggtggggggggagaggggagggga

SEQ ID NO: 168 - DNA, 899 bp, Homo sapiens
ctatctttaactgtattctctcgttttccttcctctccattttacaatcattttacaacatctctggctattctcctatatttctgatcacttcggttctcatcacaataataatttcagttttcaagcattggaaagtcccatccaattaaaatgtcaatctcacacgcagtttaaacgtttcgcctgcccgtgagctcagacctgtcttggtgcctcagttcttgtgtggaggggaggagaggagaggggaggggaggagaggaaaggagaccggggaggtggggggggagaggggaggggaggagaggggaggggagtgggggagaaggggagaaaagcgcagctggcttcctcactctcctttccttcctcaccatccttaccctggcccagggcaggaggaggattggcagagtagaaggcagggtcttctgtcttagctgggcctgttggtgactttctgttggccaacatgggctgactggaatgttctccagcatggcacatggtcatccagatgcaggctcttccctggggcactatagcagagagggctctcttccagtctattgcagatggatgccctcgtgagctgagttttgatgaacatcccatgtccccagccaccccattcagagcctctttctactctggtcctctggtcccagcagcagccctctgggtactgaggggagggcatctcacccaagccccttaaacctgctcaccttcttcagagcccacgtggccgcaggaaagtcacaaacccttgtgctcccacagggcacacgtgtgcacacgtgtgcagctaccttctctctagttggtacctgaggctgcctcctggattttccagtctctgtgttcccagacaaccccaagccccaagaatacaa

SEQ ID NO: 169 - DNA, 1002 bp, Homo sapiens
agtttaaacgtttcgcctgcccgtgagctcagacctgtcttggtgcctcagttcttgtgtggaggggaggagaggagaggggaggggaggagaggaaaggagaccggggaggtggggggggagaggggaggggaggagaggggaggggagtgggggagaaggggagaaaagcgcagctggcttcctcactctcctttccttcctcaccatccttaccctggcccagggcaggaggaggattggcagagtagaggcagggtcttctgtcttagctgggcctgttggtgactttctgttggccaacatgggctgactggaatgttctccagcatggcacatggtcatccagatgcaggctcttccctggggcactatagcagagagggctctcttccagtctattgcagatggatgccctcgtgagctgagttttgatgaacatcccatgtccccagccaccccattcagagcctctttctactctggtcctctggtcccagcgagcagccctctgggtactgaggggagggcatctcacccaagccccttaaacctgctcaccttcttcagagcccacgtggccgcaggaaagtcacaaacccttgtgctcccacagggcacacgtgtgcacacgtgtgcagctaccttctctctagttggtacctgaggctgcctcctggattttccagtctctgtgttcccagacaaccccaagccccaagaatacaagagctctgtcaccaagcatcgggcctgtggctgcactacacgtctgcagctcaggacccctggctgcggcgtaagctaccagcatccccttctcatgggcaccctcatctccggctccccatcgctgggctgtgacctgcgggggcgcccctctatggaagggaaggagaaaaattcacagtgctatctactcctctgaatgcactcccaccaatttccttggaaatttctagctttcactgacatatctgggatggggcggtggtcacaaaa

SEQ ID NO: 170 - DNA, 1002 bp, Homo sapiens
gtctctgtgttcccagacaaccccaagccccaagaatacaagagctctgtcaccaagcatcgggcctgtggctgcactacacgtctgcagctcaggacccctggctgcggcgtaagctaccagcatccccttctcatgggcaccctcatctccggctccccatcgctgggctgtgacctgcgggggcgcccctctatggaagggaaggagaaaaattcacagtgctatctactcctctgaatgcactcccaccaatttccttggaaatttctagctttcactgacatatctgggatggggcggtggtcacaaaatcaatcccactttccctcggctagtcttacaagcacccaacagctctattcagaatacagggctgcccagctacttcccattcattatccccaggttgcaagctttagtcaaaacccagaggcagcagggtgtctggttccacctgctgttaggatgatttcaggagtgcaaagtgttagaaacgcaggtaaaacatgatgcttagagattaagtgggatggggactgggcagatgatgctgctttggacccagcgagtgaggtgagactgcgacaagacagagccactgagcagtgacctgggggatgggcattgcaggcaaggcagaaccccaagtgggaacaacctcactgggcttagcaaaactaaagaggcccaaagtatactgagcgatgaggtgagtggcgtgggataaggttggagaggaggctggaaccagaccctgcagggccttgcaggtgatgggaaggagtttggaaggtgctggaaggtttgaagcagaggagggatatgatcatgcctgtagctgctatgtagaacaactgtatgcatgccaggcctgtgccacgcatgctctaatcattactggctttaacccttgcactaacgttgtcatgcaggtaggagcatctgcacccagcaaatggaaactgaagctcaggaatattcagtcacttgtccaaggct

SEQ ID NO: 171 - DNA, 1002 bp, Homo sapiens
acctgggggatgggcattgcaggcaaggcagaaccccaagtgggaacaacctcactgggcttagcaaaactaaagaggcccaaagtatactgagcgatgaggtgagtggcgtgggataaggttggagaggaggctggaaccagaccctgcagggccttgcaggtgatgggaaggagtttggaaggtgctggaaggtttgaagcagaggagggatatgatcatgcctgtagctgctatgtagaacaactgtatgcatgccaggcctgtgccacgcatgctctaatcattactggctttaacccttgcactaacgttgtcatgcaggtaggagcatctgcacccagcaaatggaaactgaagctcaggaatattcagtcacttgtccaaggctccccagctgttaggtgctaaggctggattcaatccaggacttgcagactccagtatcttggcttttctaacgagagtgtgctagctttctaatgggggtggggaaggcagttctgcccccctcccatggcaccgtgagcaggtgtcactgctccagccagtacgcctggacaccgactaggaaggagtatgtgctactaggagggatggtctgggctgactctttgaagttgacaaggagttgcataatcccagctaataattatgctggaccaggggcagagacattactccaagggtgaccaggtgtggagaagaggctgctgactccggggccccaggacctggcccccaggtctcattgcccgagtgctgccccagaaggagtagaagctggagctgtccgggccacagccgaggctgggtgaatgctgcagtgaggctgccgcacaagttgcgtgttgtgacatttgtcttctggaggggattgggatgggctacttcagcatttaaaaacccctactaggtctgagaaatcccctcagcttatgagcctgggtgggcagcaggccttctcaagaagcccagaaggccagatgctcacttcccagg

SEQ ID NO: 172 - DNA, 1002 bp, Homo sapiens
cagtgaggctgccgcacaagttgcgtgttgtgacatttgtcttctggaggggattgggatgggctacttcagcatttaaaaacccctactaggtctgagaaatcccctcagcttatgagcctgggtgggcagcaggccttctcaagaagcccagaaggccagatgctcacttcccaggctctcttgcggctgagctgagagcaggcacctgaggcctggcaagtgtgacagctggtgacacagacagacagggacagggagatgggactgtgcctgcagcggtagccctggccggtgttcagtggggccagcatccgtgtctttcctgggggccagtgggggccgtggctctgacgatgcatccctcccccacgttttttctcttcttgtcttggactttgcagggagcactctgcttttgggaacaggagctgggtctctggccattctccgcagcccctcaccattcactcagtggctctcaaaaaatagaacctgggagcaaagctgttcttggccccaaacaacatgaggaaaaataaataaataatgtacctggtaactgagagagttccctctgcatcttgggctctttcaatgagatgtcctctgcctgcagcaagccccaagggcttccctcaccaggaccagcaccctggtttgcctgaccccacacctgccaatgccggggcaagaatgtcccaggctgccctggttcccagagctgatgcttcccacagtgcccagctgtgctggcatggagctaaggacagggccagtcccaagaaaacaacaaggctccagggccaccggccactgctcaggaccctggctgaccccacagatgcggagtgcctgagatggctcatgggtgacccccaggcatctggcaaaggtcacaatggctgtttggcttgaagacagcccttgcaagatctgttttgagccaacctgtggcatttagccctccctgggtgacaaataaaaaggctgaggcttgta

SEQ ID NO: 173 - DNA, 1002 bp, Homo sapiens
attggaagataagaatgcagccaaagaggtcttcagggtagcgtgtggcctgggcgctgagactattgggcctagcaacttctcaagcagtctattaaccacagccggtagccagcttttccccgcccttctcccaggcacacacagccacctccatcaccaaaggtcaggcgaaccacctcccatggctacccccagcctgacttgctttatagaaatcatggcatctcatcctcacaacagcccacactcacagtgaatcttggccattatgacaactggggacactgaggctcggagtggtggaaattctcagaatcacataacaataagtgttaaagtcagaatttcaacttcatctctctaactccaaagggcgtgtgtgtgtgtgtgcgtttctggccataatcatattgtgccctacaagccccagtgaggaatctgctaggaacactggtttggggaaaaaatgtaataaaatatgtgatccagaaggcggcctttggtacctgtcataaaccgcagcatggggtactcactatgcctggggtctgggctctgaaggcatgattgaatgatctcactgcaggcctggttgtcctgcgaagacacccgtcaatacatgaatattgacacacaacgctgcagtgcacgcgcttctggcaggggagctgctgcactcgagggcagctcaaggttaatttgcagggttcatgtttggagtttctgagcaagtgttgcagctttggcccccagccccctgaggggagctctggccgtgcatgagggtcagacagaaaatctcctttcctccatccaggcctgcagtctgcagcactgaggtcagcgctggccacaagcccaccctgtgcctcgtcagccccactgagcctctccatctatcatgccacaggctgaccctgaaatgcaaaatcattctgtcctcccgccctccactcccacctcgcacatctatggatttgctgttcagaaaacatctgt

SEQ ID NO: 174 - DNA, 1002 bp, Homo sapiens
agttagattgagctgggtcccatcttgggcctttgctggtccctccctagaaagtctgccccctccccctgcagggtggcatcagcattcaggcctggccctgacgccctcctctctgggccaccttcacctccacaaccccggcaccagcacccatccccaccacatccccagcacgcagcatctagtaagggcaccaaatgcatgcccagacatatgagtgaaatgaattaaccctgaacctgaaaaagggcaaccaccacacaagattctctagaaacaatgtgaattgtgcagaaggaaattaaccctactccatccagcccatcctaaggcagggacttggacctgttcctcttgatggggctggggctgaggcgggcaaggcaggcaagtgctgaacagttggcaacattgcccatcccgtctccctgcaccaggctgggcctggggtgagggggtgggggccggggtagctgggctcctccagcaaagagcaggtactgagtccctggtgactattaggtaaaaggtccctgacaattttgaggggccagatgccaactcgagggatacagagaagatctaggcacagtctttccccaccatgtcagacaaaaaggttagatacaggacctgatatgttataaaactcaatcaatatttacttagtgaataaatggacggatggatggatggatgcattaggcagccaagtgggcagcaccgatgacttaatgtactgagtgctccgactccagcaacatgcattcattgttcctactgtgtgccagtgaacaagagcaatgaactcaatgacttctgcccagggtgggccagggaaccagggaagactctccaaaaaggcagcatttgggctgggacgtacagatgagtagggggtcgagtgtgtcgttatgtcgctggagcccagaggcgtccatcaggacttgggggagggcagatgaaagggccttactgcctaacttggagccactgtat

SEQ ID NO: 175 - DNA, 2002 bp, Homo sapiens
cccatcttgggcctttgctggtccctccctagaaagtctgccccctccccctgcagggtggcatcagcattcaggcctggccctgacgccctcctctctgggccaccttcacctccacaaccccggcaccagcacccatccccaccacatccccagcacgcagcatctagtaagggcaccaaatgcatgcccagacatatgagtgaaatgaattaaccctgaacctgaaaaagggcaaccaccacacaagattctctagaaacaatgtgaattgtgcagaaggaaattaaccctactccatccagcccatcctaaggcagggacttggacctgttcctcttgatggggctggggctgaggcgggcaaggcaggcaagtgctgaacagttggcaacattgcccatcccgtctccctgcaccaggctgggcctggggtgagggggtgggggccggggtagctgggctcctccagcaaagagcaggactgagtccctggtgactattaggtaaaaggtccctgacaattttgaggggccagatgccaactcgagggatacagagaagatctaggcacagtctttccccaccatgtcagacaaaaaggttagatacaggacctgatatgttataaaactcaatcaatatttacttagtgaataaatggacggatggatggatggatgcattaggcagccaagtgggcagcaccgatgacttaatgtactgagtgctccgactccagcaacatgcattcattgttcctactgtgtgccagtgaacaagagcaatgaactcaatgacttctgcccagggtgggccagggaaccagggaagactctccaaaaaggcagcatttgggctgggacgtacagatgagtagggggtcgagtgtgtcgttatgtcgctggagcccagaggcgtccatcaggacttgggggagggcagatgaaagggccttactgcctaacttggagccactgtatgtttcaaaacaaaggagacgagaggatcctgggaaagagaaagggtactctaggcagaggatgtgaatgggcacagcacaggtgagaacatcaagaccaggggtcagggaatctactggtaaacaattgtaccccaagggagcaatcacagcctctccatccacagggaaatgcctggtggggaggaatgggaggaaagaaacagattgcatgactgtgtcttgaaggtctaattccagagtacagcatcacccctatcttccaggtccagaaactgaggctcagagggagactttctgatgagtgcagcgtgcagataagagcatctccaaagctacctccttccccagtcacaccagggcataagcaactgataacagctgtcagcacgggacagtggagggaacactaggttaggaataagggtacgaggcttgagtacagattgtcaatgactcagtgtgtgaacttggtcaggtgactccaaccagatgacttccttctctgagcttctgttccctcctctatgaatggggacaatcactcagcttcacaaaacaatggctgcgaaattgcctggtacaagagagagaacttccagtgtgtaggggctgttgtcctaactgcccagccccctagataggtagttatgtcatctgtgaaatgggtgttagaattcctacctcccaggacagctgtgggcagaaaaccaaagaatgtgtgtgagagcccaagcaccatgcctggcacatagtaggtgctcaggaaaggctgagggtgcagctgctgtccacacacatggtaccactgccccaggaaggggcttcaggaaccaagagcaattctgagcactggtgactggactctgccattctccatttcaaacgctttttgaaagcagctccagacccaagcaggagagcaggaggcaaaagaaacgcaggggctttcccgaatggaattttagaaacacacagaattgtctcctgcacagaagggaagctgtcttccacagcaca

SEQ ID NO: 176 - DNA, 1002 bp, Homo sapiens
cactggagctgagactcccaggtcccctagggcttctctcccaggggcctctgggctccccaaggccacgtgctgcccccactagagacctgggccagtcctgaccaggggaaagagtagcgccgacaacagccccagatggtatgtgcactggcacatactggcagctgccttcatgacagcaagccataggtccaaatcccgccccttcacagggacattcccaactggtcaggggtggacctccccttcccggctgtctttggtgtccaggacgatttgccacagacagggggagctaaaggggcccacgcttgaggccgctcagctctgagtcctcgccggccacagaggaccttcgtgcctgtcctctgtcctcctgcccagtccccaggccaggctcagctggagttggggagcagaaaaacacgcatctgaatcaaggctctcggagcctttgcttctgcctccaagaggcgagggaaaatgaatacccaggcagagcgagcaagagagaccctcagaaaaccccagatgcccctggaatcaagccctgtcccaccaacgccacgtggattgacaggctattagtcttcctgtaattaggattctcgcctcaaatcttgtatctttttcccccagaagattctcctccagccttcaccactgccccctggcgcttccttgcaaggcttttgaagaatcctttgcagagaagcagcctcctttggcaggggctgcagagcactctgcctccctaggccagggcgaaccaacagaggcgggagatgaggaggagcagcgcggctctgctgcgtggccctgggcaagcaccacaacctctctgggccgtttgcacattcttaccgccagggatgtgggcggtaaatgaaagagaccagcacaaaccagtgtcagctcccttcctcgattcctaaaatgtgatgcccaaagatgggccagcctcctgctgtgccttctctggggggacatttaataagt

SEQ ID NO: 177 - DNA, 998 bp, Homo sapiens
tggccgcctcttccagataacaactctcctctccttccctgccctcctgctcctcctgttcgcgctacataacagactctgtggggccttggtttatgtatttccttctctcccctactgaaatacatgtgagcgatgctggggcaggccgactagaagaagcagactatctgcttcttctccacccttagaatggtgctgggcccagaagaggcatgcagtcgatatttgctgaataaatgaatgtcagataaagtggtgtggggactccaggggaaagatttgtcattctccaccctcccagttcagcttaaagcagagaagtgagaggtgcccaaaaaggggtgtgtctggggggtggggggtggggatgttccaagatctccaaggcctggattttaagcaaggtttgagatgccagcaagagggcctggcattgccagattgatagtctgcatttcagagaaggacaaccccacctctgaccttagcccagagcctcaacagcctgctcaaggagatccacccttagtaggaggaggcagccaggccaggttccagtccctgccaccgcttgccaggtgtgtcttgggcagcagttgcctttgctcggtggtcttcagctttgccccctgccaggcacgtgctggcctcctgcctgcatcgtagctcatggagtcctctcagtcacctctgtatgccctgcagcatccccagttctcagtgagaagagtgtgctctgaaagttaagtaacttacccaaggtcacacaaggtctgagtctcaaatgcatacaatttgaccccatagtctaaggtcttgaccgcaatggaataagaaattattttaccattctgagtggcagtctctgaagactacagcaataattgatgcctctcagggggataggtgtgtcacttacaggtgatagtgaggttgtcctcagcctccctgctcttcgttagacctccctcctcctctctacccgggccaagcgt

SEQ ID NO: 178 - DNA, 1002 bp, Homo sapiens
gcggaacacctctgccgcacctgcagcagccttgctctatttcttcacaagcttccccatgacactgacccaaggctgtctggccactacagctgctgatgatgattagcaataataataataataaacgaaatgccttctgcttagatcatctttaatttcccctccagaatgacattcgactctgcttagagttacaggcagcccagcaattactgagcgcaaataccgtgttcacccgcctcacctcatccacgcccccacaacacccagccctgagactggctccacgatcacctccactttataaaataagatatcaaactctgaacagaacggacgtctcaaaaaatgggcatattacatttaaaccctcaatctgttgggtatttgagtgaaatggacatacctccagggagtcggtggcgagggccggctctgaggacttcctgggttgggatcctggctctgcaggactgcgtgaccttggtgagttacttctatccctccaaacgcgctgttctccttcatagaatggagatgaccacagggccagattcataaggttgttccttgtaatacaggtgaatatccatacccagcaactgctggaccacctgtggtttcaaggataatttccctcccacgtccccgtggcccttggaaccttcctctcctcctgtctccccctgcccccatcactttgtaattgaaaagtcatgattgctctcccaggtgtagcactgctcacaggtcagattgcctgctctgacgtagtgactcagttggatgcggttcagctgtgtatgatcaactccctccccctgacaaaaacattattttgcatcacagagaagttgatttctttcacacataaaagaaggcaaaaagtggtgcctaaagggctggtacagcagcttcaagaaatcaggaagaacctgggctccttctgccttcttgttctgccaatatcaccccatggctgccacttcatggcccaag

SEQ ID NO: 179 - DNA, 2002 bp, Homo sapiens
ttgtgagtagggcacgcagggaagaaacctgttcaacccagccccgtgctagaaagacatcagcagggcctgcaaaagccctgattaaatctcacaagtttgcacctggagccgccatcttgaattgcaggtgaatatcagcctttggtttgggctgtgtgccccagatgatggtggtcccaaattacataggccaatatccagagctgggttaaaatgaagcatttcgaggaaaaaaatgcaatgaaatttgtttaaccggtacttcaggcttttgagcacagaacagcgtccatccctccaaacacacactgaggatatacacttagccaggagggaacataaggaggggtggacaagccatgtttactaaaatctctcagtgtgtgccaggcatgttcatgtatattcaggaagaagtgtcagtatttaagatcctcggcccttgcccgagtccccaacacgccttcttgtctggagaactgtaaatcttggaaacatcttgcaaggggggacacctcacagaaggcaggcttggcatgggataaacagaatcgactcctctgcttccttctgatgcacagtgaatgggcaggtggaagcatcgttgcttaaagaggaaccaaaactccaccccagagctgctaattccttttggcttgcagttatgcagagggctaaaaaatccaacgaatcacaaatcccctggttgctaagtagaaagaatatgttttggctgctgctgttcccttccccaaggaaaagattcaagcagaggcggtccccacctctcaacacagaaagcaacatctctgattgcctctagacacaccttcatgctcgtggcactttgggaccctctgcccgctggcttatgggcatggcttccccatcactctgggtccttgggaagagcctctttcccagaccccacctctgtgcctcatcacatttctcccaggctattgacttgttcaaggttaaggtatgaagagagtcactgcagcagccctacctggctctgctctgctgggggaagccttttcagagcctgcctcttcctcagcatgaggggctgctcgggcccagtcccagaggccatgctggtcccaggggaaggtggccgtcatccccatctgtgttttctcttgcaggtaagtcatgctccagcagtcgggagggttgtgtgatgacacacttggcagtttgggagcaaaagccgccacagtaagacacaattgattcattgcctctcaaccctctgctggggtggactttcatgcgtggacttctgtccccaaagaggcttctctgggtctggaaagggccctagccttggttgggggaggcaaaggggtggcggcttccaggtaccatctggccaggaaccggctccattgtctgtgcatgtagcttgcactgggctgcctgctccaagggaggcatctccccacgatctacgacattggcttcaaagagctgctcctggcagcttcgaatggctgagacctactggcatgggatggaggagtgcagggagcttcccgggacctcgctagtcctgcctggatgctcagaaggccctcgtcctcggtggcatgcagcctcggccatttccaaactcacggcatctcacccagccatgtcacccacccccggctctgtcgcccttcccatcacctttctcccacccatcacctcacatcaaggtttcagccagcgggaaccaggtttagactccaattacctgtgcgtgtgggaggttggattgtgacatctttggagggccgggcttctgaagcgacatttgatttctggtactgaaatgtcaaagggtcctgaggcacccgctagggcagcacgcggagcatccacctgcgtgcgcatcctgggctctctctgggccacttggtgctggggacatgccgggagctggtggtcagccctcctcctgcctcctcagtgctgcatcttcaccttctgcagctgcctaccagaagca

SEQ ID NO: 180 - DNA, 1002 bp, Homo sapiens
acaccttgactttagcccagtgcaactgactccacatttctggctccagaactgtaagagaatacatttgtgttttgttaagctagcaaatttgcagtaatttatgacagcgctatgagaaaccaaaacaccaggattatgccccaaggatcctgatgccctccctcctctctgctctgcagtgtgctggagctcacagggctctgctgctgggagttagtatctagtccaacactttacccactcaccccccaagctaagggactcctgaaatcagggaccagatgcataataggtgcccaggaagtgagactcgccttccccagattaagaataaagaagacaaactatccacggctgctgtgagcctctcatcagacctcagcttctagggcagggtccctgcctgtctccagtatgtggcctctgtgtcttcttcgccctccatccccacagtgggacgagaagtcatcaggaaggcaggggatctgcaggcagccagtcagggctctaattgcagctggctgggggaccatgggtcagggctgccaccccctggctctgtgccttcacctgtgtaacgaatggggcactcacagcccctctcaagtggtcctggggatgaagtgagaaggtgacatatacaagtgagttatacacgttcctgttctgtcactcaccagtgctcactgggtgggtcactgaactcccctcagcgtttccttctccatctgtaaaccaccagtgcaaacctttcccagatagtgctgacccgaagcaggaaccagtgcccctctgccctcagtaagtctgccagcagaggaagcccatagagggtcttgggaaatgaagccaacagagtcaagagggtcagatgatgagggacttcaagtgccaccttcatcccattctttctgcaaatattcaccacacacctacgtgacctcaggctctgtgtcaggtcctggggatgtaatggtgtccatgaagaaacaaggtccc

SEQ ID NO: 181 - DNA, 1002 bp, Homo sapiens
tccccagattaagaataaagaagacaaactatccacggctgctgtgagcctctcatcagacctcagcttctagggcagggtccctgcctgtctccagtatgtggcctctgtgtcttcttcgccctccatccccacagtgggacgagaagtcatcaggaaggcaggggatctgcaggcagccatcagggctctaattgcagctggctgggggaccatgggtcagggctgccaccccctggctctgtgccttcacctgtgtaacgaatggggcactcacagcccctctcaagtggtcctggggatgaagtgagaaggtgacatatacaagtgagttatacacgttcctgttctgtcactcaccagtgctcactgggtgggtcactgaactcccctcagcgtttccttctccatctgtaaaccaccagtgcaaacctttcccagatagtgctgacccgaagcaggaaccagtgcccctctgccctcagtaagtctgccagcagagggaagcccatagagggtcttgggaaatgaagccaacagagtcaagagggtcagatgatgagggacttcaagtgccaccttcatcccattctttctgcaaatattcaccacacacctacgtgacctcaggctctgtgtcaggtcctggggatgtaatggtgtccatgaagaaacaaggtccctgccctcatagagtggcctgacatatgcccgaggcagtcagcagccgagtgcgggagactcttgagcagagattgagtgtgttgatatctgtaggcatcagcctggctttgctgagtgagctatatcagagtggaggaggccagaggcaaagtccagactccactggatcctggattgaggggagaaggggctgggcggaggagcagcctgagcacctgcatctcactccaactgggtgctgatttgtccccatggccccagcacccaggcaggtcaccaagtaagctcaagacaaaaatgatgagtgactcaacagtg

SEQ ID NO: 182 - DNA, 1002 bp, Homo sapiens
ataaattggatttcatcaaaaatttaaacttctgctccaaaagacactcttaacaaagggaaaaagcaagccacaatatgagaggaaatatttgcaaagcatctgataaaacatgtggatctaaaatatgcaaggagaataacaactctattttccactaaggaatgaatgactgtacaaggaccacattctaattaggagcttctgaacccaaaggaatttcagataaggggaaatttaggcccaaagccaggagaaggggtgagtagggcttgatctctgcctctgaagggcagagggcgtggactattcttggctcttaggggacagctagagaaatgtgggtctcatggcgacaactctggactccattggaagaaccttctaacagtcagggctcccagagataaactagacaagtcaccaagagaggcagtgggtacccctcacaggaggggtgcaaatcaaagccaaggcttggagtggaccatattaaatccattttcttatcctgtgattcttagagtcctatctgtatcaggggaaggcaggtgggttctagaactttctaaatgtgtccctgtgggtttttccttctccagctacacacaaacttgggcctaataagaagtctatggcattaacccagcaggaatgcttaatgcttatatctgacctcaaaccaagactgtctccacagtgaacaaccccgtcctgtcccctgggcgtctccttagcaaatgccatcagtcaatggtgcagccatcttggagcccttgccatctataatcttctaccgccacccccccagctgattgttttctttgtatgtctccttcctggacattacttattctttacttttaaatatttgcttccgtaaaaaaacaaatgaatgcctcggacagatttataaagaacattcctggagaggcgggtggattaattattcagcatcctctccctttgtaactatttattgtctcatatgcatttatatgg

SEQ ID NO: 183 - DNA, 963 bp, Homo sapiens
ttgcccaagtgatgttccatgtcaggctctagggtccctgcagggacagagagggactaacatttacttacatgcctatagtatgtcaggcatatacttgtgcctttatatatatcagctctgtttttgtcattaaaacatccctgtagaaagataggcactgctgtcccattttacagatggggaaacccaagctctgagtggttcagcaaaccctgggtgcatacccccaccttgcccctgcaaaaccaacaaaaaaacgaaggccctgccttcctggagctgacatttaggttgattctgaaagtcagtaggcccagattttcactcttcatttttcttgtttggaatgagagagcacacagctgggtcgggggaaggagcgagggtctaggcctgcatccactcaccccaaaggaaaggagtaggggaccagtctgctggacatgcagacagcgattggagaaaagtcagcccagctatgaaccccattcctttcagtactgagccaagagggatggcatctgtcagagttgctggatttgggattttgcatcttgccaagtgtccatgaggaattggggaaactctccccctggctggactgaggcttcagcaagcattgttgctgcccagtggtgatcagctcagtgtccttggaaaagagcagaaagtggtatcacgaacatatcttctcctttgcttccttctcctcactcttcatcatcatcatcatcatcatcatcaaatatggatctgtgaggctacctctggggttgaaacttggttttgggcaaaatttgtgatgttctctctgcccaatccagcctcaggctacaaatgaatgtaaaaatctctaatttagtgccaagtaacagaaaacagctctacttatcttaagccaaaaagagggacttctcagaggcatactaatggaggatggcaagagggcctcacgtggaa

SEQ ID NO: 184 - DNA, 1002 bp, Homo sapiens
gctcttctgctgtggaggatccatgccattgacctaggcacccgttttccacatattgagcattgctgagcacctattctgtgccaggcactgtgcttcagggccatgggggatgctccaagcggtaaaatgcaaccaaagccccgaaggagctcacattctagtcatgtccacaaagaggtaataaatccataaattgtatgtactattctagtcacaataaaattgtgtcgtactgtaatgctgggtatccattttaaaacggggggcatcggctgaatctgggtcattacagtaggaaatgcatatatataatcatttactcatgaatattaatgtatttaatgagggtaaaagatattacttaaagcaaagtattcgttccagctactgttggatttgttcattactgtttcccatgcagatattacctgtgatttacctgcatatcaagcatctggaagtagctcaaatccacctgtgggtaaattaggttagccagtttgttggcaaaaattacagtgttaactaatttccagggtatgcttgcagtcagtagtttcatacttaggtacatgacttgcattcacatcatctggttaatggtgtgaacagagattttctttatggtttttggaatacagtaagataatgttaagctaacgtaagtctgttaacagtacctggttctgaactgtatttataaggtgtatcataaaaccattactttggagtttgccaatcttaaattcagaacaattcaaaaatgagccagaatctagtttgcatcattaccacttataaaaataaggatctgtaagttggctggataaaatatattacaaaataatgacttaagtggctctggagccagcacaaaagataaaaattgggtatactcaaaattaccttcaaaatatcttaagtcattcttaaaatacatgtaaatatgccaactcaaaatacatccaacaaaactaatatttttcccaatttgttgga

SEQ ID NO: 185 - DNA, 1002 bp, Homo sapiens
tcgacgtttccaaagtcatggggcctatggtttgtgagcttatttaggttgtccccgggcccagcatcaaaagcattgagacacgtactgagggactcttttcctagcctctcagtcctgactgctcaaggaccaagtggtacttcttgcctgcgttcctttaatgcttgcctaatatgagctagtcttctctgatcacttttttttttaatccaaagtaggtgggcattgtcccaagagcctttggaaagcagctgcctctcactaggacttcacagcatcattttgctttgctctctttgtggttaaaattaccttccattcgtggtgggtgtatgtcaggatccccacaagaaacagagggacacccaaattagggacatacttcagagggactaatgacaaaggcatgggtgggagtagaggggaatacaagggagacttcaagaatcttggcctttattataaatgcaatgtatgtccactatggaaaatttgggagaaaaaagcaaactagaaagaagaaaaaccacattgcctgaattcctactgcatggagagaagcatcataaacaccttttggaggagtctcttcttcctttctccctttctccttctttgtatagagaggtctttcctgaggacttcccagaatcttgcagatccaaaatcttaagaatttgcagaggcagtgaggagttaacatgcacagctcagggaatattctgctttttatctggaaccaggctcggaacaagactccttgcttttctgtcctgtgttttcatcttctctcagaaccctaactttgagataagatctttgactattattaggcgggtgcaaaagtaattgtagtttttggcattatttttaatagaactgcttctgtgtcctcagatctccatcgttcatctcctgataagtccctgaaaatttcctggccccttggagctccttccaggagtagaatgatcacaagagctgccatgtattgcttat

SEQ ID NO: 186 - DNA, 1002 bp, Homo sapiens
ttgcttattccaacttggacttgccggagtcccatagacagaggctactctcccaccgtgctgaagctggtgcatgccatgtttcagtaagagaaaggagggtgcctgggcttcgtctccacccaggtgcctctcccccagcagctgcaccaggccagctgagggggattttagcccgaatccagggtttctcctacagaagacaaggagtttgggcactgccagaattagaagaacagaaagaaaatgttctggatttctcatcaaatgcccctagcctgagaaatataactaaattcacccttaggtcatcttacaatctgtcctgccccagtgttccccactcagggaactgctccacccacatcctggtccccaaaccagaggcctgggagtcacccttgacatttcctcccctacacccctaatcaatcaaatcctgtttatcctgccctctgagagtctgcaccgaaatctctctcctctccttcccacctaccagtggcccagcagctttaccatcatgtctcacggatctctgcaccgctcccaactggcctgtgcgttcactcctgccccctcctccagccctgtgtacactcccttccaccatcctttctatactctcctcaatcctatctgcaccctccttcaaccctgtctgtactctcctccaatcctgtccacacactccaaacaaagtcatatttccaagacaaatttgaccatgccactttctcccacagctctccaccacctccaggatcccatcctcagtgttagccagacactcccaaggccttgtgatctgccctgcctatgtctccagcctcatcctgcaactccccctacactctgtgttctggccatcaaaccaatgggctcctcttcctgcacccccatccactcttgcacatcctgcactctatgtctgaacagctcggtttctcttcttttcttctggcacatgtctgctctacctgcaggtcatcttagatgtca

SEQ ID NO: 187 - DNA, 1002 bp, Homo sapiens
aaaagggaatttattggctcatgtaactgaacttcaacattttacagaatctcattggctccaatgggctcatacgtccatccccaaaccaatcacagtgactgagggattatccaaggatcacactggccactttcacaggttttatccctaaaggaaatcacaggtaatagatgtggggctgcagaaatgcaacatgcacttttccttgaaactgcatcccttttccctgaagatgaagcttgaaagaactctaagaggttaagcatggagctgatgggcaagccacaggcagaaagagtagctgtgcagccaggctcctggccagggagggcagataaggaggggaggcaaagtttggtaaacaggaagctaatctatgggcaagaatcattttcttcagcatcctgacctctcctaaaatgttctccactggtccctgctaggacaaaggaattaccaccagactagagtcaggagtcctgggctggttctgctgtagtgacacaggacaggtggcttgcctggtctgggccacagcctcctcccctgttgatgagcatgttggttgttccagcaccatgtcagccctagaaatctctgaattcttgaccagatcagtaattgctctcttgcgtttacttttccttcaaataaagagattggcatacaggggaggagcccagtacagacggcatgcttggctcaggttccagaacccagaaaccagacaagagttgggaaaccatgatggtggaggagggtgtgccactccttactagtgcctaatctcttcgagacactaatgtttcagtattatccacagattctgatgccaggcagcccagatgactggggtcagttattagcatgcttcctggaggtggttcccaggtgcaggctacctgcagtctggctggatgggccctgcaccacacttgcttctgggaagctggttttggggttgccacaatctctgaaagaatcactaggccaccctct

SEQ ID NO: 188 - DNA, 1002 bp, Homo sapiens
ttcacaggttttatccctaaaggaaatcacaggtaatagatgtggggctgcagaaatgcaacatgcacttttccttgaaactgcatcccttttccctgaagatgaagcttgaaagaactctaagaggttaagcatggagctgatgggcaagccacaggcagaaagagtagctgtgcagccaggctcctggccagggagggcagataaggaggggaggcaaagtttggtaaacaggaagctaatctatgggcaagaatcattttcttcagcatcctgacctctcctaaaatgttctccactggtccctgctaggacaaaggaattaccaccagactagagtcaggagtcctgggctggttctgctgtatgacacaggacaggtggcttgcctggtctgggccacagcctcctcccctgttgatgagcatgttggttgttccagcaccatgtcagccctagaaatctctgaattcttgaccagatcagtaattgctctcttgacgtttacttttccttcaaataaagagattggcatacaggggaggagcccagtacagacggcatgcttggctcaggttccagaacccagaaaccagacaagagttgggaaaccatgatggtggaggagggtgtgccactccttactagtgcctaatctcttcgagacactaatgtttcagtattatccacagattctgatgccaggcagcccagatgactggggtcagttattagcatgcttcctggaggtggttcccaggtgcaggctacctgcagtctggctggatgggccctgcaccacacttgcttctgggaagctggttttggggttgccacaatctctgaaagaatcactaggccaccctctgagtgggtccttctgtaggaattatggataaaattgttccactagtcttaccttcttggggaacccttcctggattcccaggctgggctgggtgtccctgcagcctagccccacagccctcctgcttctctttc

SEQ ID NO: 189 - DNA, 961 bp, Homo sapiens
tgacctctcctaaaatgttctccactggtccctgctaggacaaaggaattaccaccagactagagtcaggagtcctgggctggttctgctgtatgacacaggacaggtggcttgcctggtctgggccacagcctcctcccctgttgatgagcatgttggttgttccagcaccatgtcagccctagaaatctctgaattcttgaccagatcagtaattgctctcttgcgtttacttttccttcaaataaagagattggcatacaggggaggagcccagtacagacggcatgcttggctcaggttccagaacccagaaaccagacaagagttgggaaaccatgatggtggaggagggtgtgccactccttactagtgcctaatctcttcgagacactaatgtttcagtattatccacagattctgatgccaggcagcccagatgactggggtcagttattagcatgcttcctggaggtggttcccaggtagcaggctacctgcagtctggctggatgggccctgcaccacacttgcttctgggaagctggttttggggttgccacaatctctgaaagaatcactaggccaccctctgagtgggtccttctgtaggaattatggataaaattgttccactagtcttaccttcttggggaacccttcctggattcccaggctgggctgggtgtccctgcagcctagccccacagccctcctgcttctctttctcatcacagtcttgttatctctaccaactgtaggcctgccccactgatggtgtgaataaagggactgggtctctctagcacctagcatagatctgatacatagtgggtgatctctattgaatgaacgatgaatgaatgaatgaatgaatacatttagataattcagattactctttctagctcagcagtgtaaagcaggaagacatgctgtcaatatgatttagggcaagttt

SEQ ID NO: 190 - DNA, 1002 bp, Homo sapiens
aacgatgaatgaatgaatgaatgaatacatttagataattcagattactctttctagctcagcagtgtaaagcaggaagacatgctgtcaatatgatttagggcaagttttcaaatctctctggacctcagttttacctcttgaaaaataaatataataatttgtccttacttcatgagactattttgaagattaaatgagataatgtatacactactactcactgtccttacttgaatattcctaggtccttggtgctacattaggctacatagaatgtatttaaagtaatagagtggtatttaataaatattcattttctttccccagaactaccttaaattaatttgttgaaaggacagatggatggatggttgatggaagtagcaggcttccagcagcaggggatggagtgagtgtgtggataccgctggatcagcagaaggttataccattttagagtaactatctcggacttcggagagttcctgggtatgaagcgtttggctttaattaaagtctcagcacagtgttaaatgccattttattttaggtcataattaacactaatgagatgagtggattacaaagagcacacattttgagaaagtgaaaaacaacatctgagcttggtggtttccattttcgcttttccccctcccatgctctgttcaattaaaagttttgagaaaatattacaaccatactccttgtctttgtggtaatgaagcatattaatttgaatgtgatgaatacaatattccactgacttttttattcccttatctacaaaagtttaaaataatggaccaattaaaccaggagagaagaatgcagggtttgcctggggatccaattcagcaaccagagaactgaaagaacaaaattttttgacggagtctgggccagacttcatcccttacctatagctgacaaacagtaagtcaaattgggcagatgtggaccagcgcagaacacatactatattgaggatcgaaaggc

SEQ ID NO: 191 - DNA, 1002 bp, Homo sapiens
gtgtaaagcaggaagacatgctgtcaatatgatttagggcaagttttcaaatctctctggacctcagttttacctcttgaaaaataaatataataatttgtccttacttcatgagactattttgaagattaaatgagataatgtatacactactactcactgtccttacttgaatattcctaggtccttggtgctacattaggctacatagaatgtatttaaagtaatagagtggtatttaataaatattcattttctttccccagaactaccttaaattaatttgttgaaaggacagatggatggatggttgatggaagtagcaggcttccagcagcaggggatggagtgagtgtgtggataccgctggatcagcagaaggttataccattttagagtaactatctcggacttcggagagttcctgggtatgaaggtttggctttaattaaagtctcagcacagtgttaaatgccattttattttaggtcataattaacagctaatgagatgagtggattacaaagagcacacattttgagaaagtgaaaaacaacatctgagcttggtggtttccattttcgcttttccccctcccatgctctgttcaattaaaagttttgagaaaatattacaaccatactccttgtctttgtggtaatgaagcatattaatttgaatgtgatgaatacaatattccactgacttttttattcccttatctacaaaagtttaaaataatggaccaattaaaccaggagagaagaatgcagggtttgcctggggatccaattcagcaaccagagaactgaaagaacaaaattttttgacggagtctgggccagacttcatcccttacctatagctgacaaacagtaagtcaaattgggcagatgtggaccagcgcagaacacatactatattgaggatcgaaaggccaggttccagaccgtcctctaatattttcttagtgaatatttgttggatgaatgcatggatggg

SEQ ID NO: 192 - DNA, 963 bp, Homo sapiens
cttacttcatgagactattttgaagattaaatgagataatgtatacactactactcactgtccttacttgaatattcctaggtccttggtgctacattaggctacatagaatgtatttaaagtaatagagtggtatttaataaatattcattttctttccccagaactaccttaaattaatttgttgaaaggacagatggatggatggttgatggaagtagcaggcttccagcagcaggggatggagtgagtgtgtggataccgctggatcagcagaaggttataccattttagagtaactatctcggacttcggagagttcctgggtatgaaggtttggctttaattaaagtctcagcacagtgttaaatgccattttattttaggtcataattaacactaatgagatgagtggattacaaagagcacacattttgagaaagtgaaaaacaacatctgagcttggtggtttccattttcagcttttccccctcccatgctctgttcaattaaaagttttgagaaaatattacaaccatactccttgtctttgtggtaatgaagcatattaatttgaatgtgatgaatacaatattccactgacttttttattcccttatctacaaaagtttaaaataatggaccaattaaaccaggagagaagaatgcagggtttgcctggggatccaattcagcaaccagagaactgaaagaacaaaattttttgacggagtctgggccagacttcatcccttacctatagctgacaaacagtaagtcaaattgggcagatgtggaccagcgcagaacacatactatattgaggatcgaaaggccaggttccagaccgtcctctaatattttcttagtgaatatttgttggatgaatgcatggatgggtggatgaatagatggatggatggacagatggacggagagagagatggatgaatggattgttgg

SEQ ID NO: 193 - DNA, 939 bp, Homo sapiens
gcaggcctgtgaacctgacacatggtccaggtgtctccctgaggacttctggaagtctccccacctctctgtggtcctttaggcattaacaccaccttgtcactgtgtcttctgaggcagtctggaagttcataccccacaatctctgtgtaccttgtcccccattctgttctctgcattgcagatggtttaaaacacacacacatacacgcgcaaaatgttgttccttttcttaaaacccattgtggccaggctagacaaatccttaacacggtctacaatattctgcatggcatggcccctgggtgcctcccaacctgatctgtcacacaccacctccacctttgcctgttccctgggccctagcactaacctttggttcattcctagacaccttttcagcacttaggcccccacagccctcagaacctttacacttgctgtctcttttgctttaaagtgttcttgccccacctaccacctagttaatgccttttcctccttcagctcttagttgaagcatcacttcctcaaggagggcagccctgatgaaactcattatgcaaactccagcctgggttgggccttatctttatgctgtcatggccctgagtattcttcctttatggcaccaatcacggcttatatgatatacttatgctattatttgagttatgtctgtctcccccagtatgccactagtattagaatcattgatttttaatcattgtatccctagtgcttagcacagagcctggctcataatagatgcttaataaatatttgttgaataaatgaatgagtgaatgaataaatgcctcattcaagagctttggctctttctgtactactacattacttctattttttagctcttaattctcaaagcactttctttgtgctgggcttatgctgggagcttagacagtaaagcttaga

SEQ ID NO: 194 - DNA, 1002 bp, Homo sapiens
ttacatccacaggtttgattataaatgtgtgtattgaattggaatttctgttgaaattctgatcccttctagacaaagaaggtaaaaattgaaacatgtcaatggatatctaaatatcattactcactggctttatttgcaaatggctttccattgacaacagttacattttgttcaaagcaacaaatgattggcgctgacaatccacaggaacatggtgcagtcattaatgaatgtgctcattattcctccctgccgggaggcatcgactcccgttctccagcctgttttaagcagacagacctacatctgcacctgtcagcttggaaccctagtaggggagggggatgctgatgtgatggagaatgaagaatgggccctgcaggctgacattttgggagagtaggttctgaaatttatcccaaaggacatggaatcctggaagcagggttcaagatcctcccaaaattgatctcccaggatgcttggaatgattgttcctgagggttttgtaaaatgccaggggaaaaccaggaagcttctctccagttgtcttgcctccttcctctccagtctccatggagctgactttgagaattaactcctgagggacagagaccctgggatggagagccagccctgctggattccacaaggtgctgcttaaagcacaacacctcttcccaatgacaggttctgaaagaaggccttgtagctagatgcacagagggttttgttttgtttttttttttttaacctttcagcatctgtctaaaattgctctgggctgggtacagtggctcccacctgtaatcccaacactttgagagctgaggcaggaggatcgcttgagcccaggcgttctagaccagcctgggcaatatagtgagatctctatgtctagaatgttttttaattagctgggcttgctgcctgcacctgtaattccagctacttgggaggctaaggtggggggatcactcgagcccagggggctgaggc

SEQ ID NO: 195 - DNA, 1002 bp, Homo sapiens
ccttctagacaaagaaggtaaaaattgaaacatgtcaatggatatctaaatatcattactcactggctttatttgcaaatggctttccattgacaacagttacattttgttcaaagcaacaaatgattggcgctgacaatccacaggaacatggtgcagtcattaatgaatgtgctcattattcctccctgccgggaggcatcgactcccgttctccagcctgttttaagcagacagacctacatctgcacctgtcagcttggaaccctagtaggggagggggatgctgatgtgatggagaatgaagaatgggccctgcaggctgacattttgggagagtaggttctgaaatttatcccaaaggacatggaatcctggaagcagggttcaagatcctcccaaaattgatctcccaggatgcttggaatgattgttccgagggttttgtaaaatgccaggggaaaaccaggaagcttctctccagttgtcttgcctccttccgtctccagtctccatggagctgactttgagaattaactcctgagggacagagaccctgggatggagagccagccctgctggattccacaaggtgctgcttaaagcacaacacctcttcccaatgacaggttctgaaagaaggccttgtagctagatgcacagagggttttgttttgtttttttttttttaacctttcagcatctgtctaaaattgctctgggctgggtacagtggctcccacctgtaatcccaacactttgagagctgaggcaggaggatcgcttgagcccaggcgttctagaccagcctgggcaatatagtgagatctctatgtctagaatgttttttaattagctgggcttgctgcctgcacctgtaattccagctacttgggaggctaaggtggggggatcactcgagcccagggggctgaggctgcagtgaaccatgattacaccactgaactccagcctgggcaacagagtgagaccctgtctcaa

SEQ ID NO: 196 - DNA, 1002 bp, Homo sapiens
ctgatggaactgggatgtgagaagaaggcaggttttctgataaacaattcctgtatctttcacaaatgccaaatcacagactcagcttgggacatatgaggacagcacagactttggaggcaggtagattttgggttgtcacgcagacacccactactatgagacctggatttccttctgacgttattggggataagaagtggcacctcaccatttctaggaaatagtaggtaagtctttctggttgccactgaggtgactcacctgagacacagttgctcctaaagttcaaggttaggagacaatccagaaggggagctgtctgtgaagtcagaattcttggaagaatgtaagtctttacacagtaacagcaaagcagacagtgggaaccactactctgccttcttgcatcattctttcctagaaataccagaaagcagtgagggattaagtctaattcctggcacctgaccttatatctaacagatgctcagtattaccgtgttgatgggacctcactgggaatgttttgtgtgcagtacaaaagggcaatagatgaaactttgggacgggagcccaggaaaatggctgagaggagagcttatgcctagcttatgcatgagcttgcaaaaagggagaatacacgggagggaagatcagcaacagcatgagttttataaggcagagagttgttgggaaggaagcagcagggagaggggaaggagtaagtagaaacctagaagagatacagctaagataagccaagagaacaaagtattgacttaccagaaacatggaagtcttcctgcttctaatttagttccgcatatctggatatgtgaatgcctaaaatcccattaagcccagtgggttaattattacacttgctagggccccagaggagaggaaacacagtaagtcagaaaaacctctgggcaggtgaatttctcaggttttcttctgggcagatgggatctggaatggtagcgtggcatcctggta

SEQ ID NO: 197 - DNA, 969 bp, Homo sapiens
cctttccaatattaaaataatattaacattggtaatagtggtactaaacaacttagggtgttttttttttcatttaatagtatatttttagtatctttccaggaaaagatacatggatgtgccacattatttttaatggctcacatggtactccttttatgtatgcactataatttatggaaccagttttctcaccgatgagcatgtaagttctttcagtcttttactgttataaacgaatgatgcaatgaatatccttgtacatatatatttgtgcgcatatgtaggtatccttacaagtggaatttctgaataaatggatatatacaatttatttatgaatttaccttcctacaagtgattcaagagagtgtctttgctccacagtgttgtcaatatagtgtattctcaaaatctgacaccaatatgtgtgaagtgcctgctctgttcccacactttacacaggttctcttatttgcagttaagtttatttaagaagaggaaactgggcctcatggagatctaggaacttgcccaaggacaggtctctgtgactctaagagtgcaatcttcccttttccccatgtcaagcacctttccccaccaggctcactgctgacaatccagtgtacgaagaagggaaattacccccacagagcccaaaagtttaggacatgccgacagcatcactcttttgcctcctcattctctctttcatttccagaacatttgctcactcagtgctgcccagtgatacttagccagcctgattacccatctaataatttctgatactaatataaaaccttcccaaagacaaatataactgagacgcactccagcttaccatagctttcctggtggtacagtttccagggacatttcactgtgtcaaagcagggaccacatatgttccagaccagcttgttgggtttttcactgggaagtgaagacaaattgttgtccctt

SEQ ID NO: 198 - DNA, 1002 bp, Homo sapiens
ttcccacactttacacaggttctcttatttgcgttaagtttatttaagaagaggaaactgggcctcatggagatctaggaacttgcccaaggacaggtctctgtgactctaagagtgcaatcttcccttttccccatgtcaagcacctttccccaccaggctcactgctgacaatccagtgtacgaagaagggaaattacccccacagagcccaaaagtttaggacatgccgacagcatcactcttttgcctcctcattctctctttcatttccagaacatttgctcactcagtgctgcccagtgatacttagccagcctgattacccatctaataatttctgatactaatataaaaccttcccaaagacaaatataactgagacgcactccagcttaccatagctttcctggtggtacagtttccagggacatttcactgtgtcaaagcagggaccacatatgttccagaccagcttgttgggtttttcactgggaagtagaagacaaattgttgtccctttgaaaaagcatctttcatctctccatctatctgcgatctaaagcaatggggctctttctgtatgtctttcaaatggtctacactgacacacgttttctctgagctgccgagagaatatgccatgagatgttgccagtgatggttacactcagctagcagaagattagggactggttaaacctttggagaaattgccttgggaaaagaggaaataaaagcaaatattactatgaaacatagagattaccaggtaggaggaggagagaggtggagggaggggtaggagtggaaggaagggagggaggcagaaagaggaaggcagactggtggaaaataaaccgtgcactttagaacagcaggaagggaggcttggaagcctggttttctggctttgaatgaccgcctagcgcttgccggtgcgccagggtgctgtgaggatgtgggcagagggcgagtccgaagggctccagacactgggaa

SEQ ID NO: 199 - DNA, 1002 bp, Homo sapiens
gagaatatgccatgagatgttgccagtgatggttacactcagctagcagaagattagggactggttaaacctttggagaaattgccttgggaaaagaggaaataaaagcaaatattactatgaaacatagagattaccaggtaggaggaggagagaggtggagggaggggtaggagtggaaggaagggagggaggcagaaagaggaaggcagactggtggaaaataaaccgtgcactttagaacagcaggaagggaggcttggaagcctggttttctggctttgaatgaccgcctagcgcttgccggtgcgccagggtgctgtgaggatgtgggcagagggcgagtccgaagggctccagacactgggaatagtggtggtcgtgtgctcctccctgaaacttttgcactacctcggactgattgacttgtcagacggtaagcgaaccctggagcttccccgttttctgtgaatgtgtttttgtggcttcggttgctgtgacgagtcgtttcgaaaatgcacggaaatgagggcggagacccgagagatttgaaaaagccgggctgaaacagcgtggtattggtccccgcctccccagtcgcgccccagtgctgcgctgtccgtcgtgctgaaatgtggtgcgcctggggagtgcgggagccaggaagttagggtctcctgctccggccctatgagcatgtgagtcttgatggattattagctatgggtgaggccagcacaacacatcacaattctctctgaagctgtctggtaactacgtatattgttgatggaagccagtgacttttaaaagccattatgttgattaacttttttaaagaagtttaggagattatatggaggtaaaaacctttgtaaaatgctaatcacagtgtctgacaattagaacacatttaataaatgtcagtttctttgctcaacccttataagaacccttattccaaagccacctcctcagctctgacttcagctccattcctta

SEQ ID NO: 200 - DNA, 928 bp, Homo sapiens
tgctgtgacagtcgtttcgaaaatgcacggaaatgagggcggagacccgagagatttgaaaaagccgggctgaaacagcgtggtattggtccccgcctccccagtcgcgccccagtgctgcgctgtccgtcgtgctgaaatgtggtgcgcctggggagtgcgggagccaggaagttagggtctcctgctccggccctatgagcatgtgagtcttgatggattattagctatgggtgaggccagcacaacacatcacaattctctctgaagctgtctggtaactacgtatattgttgatggaagccagtgacttttaaaagccattatgttgattaacttttttaaagaagtttaggagattatatggaggtaaaaacctttgtaaaatgctaatcacagtgtctgacaattagaacacatttaataaatgtcagtttctttgctcagacccttataagaacccttattccaaagccacctcctcagctctgacttcagctccattccttagtgagaatggggttataaatccaggttaacccgattgtttaggattagaaagtgatttggtttccaacgttgaaggagttcaagaaacaaagagttttatttttcctccttatgagatattgttccaaatagaacacagtttgtctagatgatttttgtcacttaaaattaggctccaggaaagattccaaatttcatgagcaattgggctcataaaacaagatcaaactccaatagtgtatatccaaagtatgtataatgtgtattcggtgtatattcttccaccactgcatggtgtagacagaatttctcttccaaggggcaccacatgacaaaaccgtacataataatgaaatgcatttgtagacaaaggactagctaaaataccaactgaaagtgggaagaccagaaactgaag

SEQ ID NO: 201 - DNA, 2002 bp, Homo sapiens
aattgccttgggaaaagaggaaataaaagcaaatattactatgaaacatagagattaccaggtaggaggaggagagaggtggagggaggggtaggagtggaaggaagggagggaggcagaaagaggaaggcagactggtggaaaataaaccgtgcactttagaacagcaggaagggaggcttggaagcctggttttctggctttgaatgaccgcctagcgcttgccggtgcgccagggtgctgtgaggatgtgggcagagggcgagtccgaagggctccagacactgggaatagtggtggtcgtgtgctcctccctgaaacttttgcactacctcggactgattgacttgtcagacggtaagcgaaccctggagcttccccgttttctgtgaatgtgtttttgtggcttcggttgctgtgacagtcgtttcgaaaatgcacggaaatgagggcggagacccgagagatttgaaaaagccgggctgaaacagcgtggtattggtccccgcctccccagtcgcgccccagtgctgcgctgtccgtcgtgctgaaatgtggtgcgcctggggagtgcgggagccaggaagttagggtctcctgctccggccctatgagcatgtgagtcttgatggattattagctatgggtgaggccagcacaacacatcacaattctctctgaagctgtctggtaactacgtatattgttgatggaagccagtgacttttaaaagccattatgttgattaacttttttaaagaagtttaggagattatatggaggtaaaaacctttgtaaaatgctaatcacagtgtctgacaattagaacacatttaataaatgtcagtttctttgctcaacccttataagaacccttattccaaagccacctcctcagctctgacttcagctccattccttagtgagaatggggttataaatccaggttaacccgattgtttaggattagaaagtgatttggtttccaacgttgaaggaggttcaagaaacaaagagttttatttttcctccttatgagatattgttccaaatagaacacagtttgtctagatgatttttgtcacttaaaattaggctccaggaaagattccaaatttcatgagcaattgggctcataaaacaagatcaaactccaatagtgtatatccaaagtatgtataatgtgtattcggtgtatattcttccaccactgcatggtgtagacagaatttctcttccaaggggcaccacatgacaaaaccgtacataataatgaaatgcatttgtagacaaaggactagctaaaataccaactgaaagtgggaagaccagaaactgaagtgtaagatgaggtaagccctggagtaagagtcaagaaatccactttctatccataatctgtctcggtttaatgttggtcaagtcattttttaaaaaattctaggtcttggtttccttatgatgactttagatctctgttccttggaattctagagtgatccaaaggtttctttgaattcagttttgtgggttgagacgggcagccagactgtgagtccctcagctctgcttcaaccagaacagctccactttactgttcagcatgttagccctgtatgtaaggatgttttttagctttagctaaaatttagtgactctatgaccctaaggccctgcttccctgagattttgaaagctgaagcacattcggaaaactttttcttccttaaaaatcacctgaaatctgacaatctggaagactagttctgtctgctccagcccttggtcccttagatgtgcttttctgaagatccaaactcaacctgccagtcaatataccaactgagcagagcccctgttctccaccagatttcaagagaacatgttccattcctgttcagagcttcagagcagcttccgctaagattgcacattaatgcaacagcgtcctattttctttgtttctttttttttttttttttttttttttgatgagacaggg

SEQ ID NO: 202 - DNA, 895 bp, Homo sapiens
atttttcctccttatgagatattgttccaaatagaacacagtttgtctagatgatttttgtcacttaaaattaggctccaggaaagattccaaatttcatgagcaattgggctcataaaacaagatcaaactccaatagtgtatatccaaagtatgtataatgtgtattcggtgtatattcttccaccactgcatggtgtagacagaatttctcttccaaggggcaccacatgacaaaaccgtacataataatgaaatgcatttgtagacaaaggactagctaaaataccaactgaaagtgggaagaccagaaactgaagtgtaagatgaggtaagccctggagtaagagtcaagaaatccactttctatccataatctgtctcggtttaatgttggtcaagtcattttttaaaaaaattctaggtcttggtttccttatgatgactttagatctctgttccttggaattctagagtgatccaaaggtttctttgaattcagttttgtgggttgagacgggcagccagactgtgagtccctcagctctgcttcaaccagaacagctccactttactgttcagcatgttagccctgtatgtaaggatgttttttagctttagctaaaatttagtgactctatgaccctaaggccctgcttccctgagattttgaaagctgaagcacattcggaaaactttttcttccttaaaaatcacctgaaatctgacaatctggaagactagttctgtctgctccagcccttggtcccttagatgtgcttttctgaagatccaaactcaacctgccagtcaatataccaactgagcagagcccctgttctccaccagatttcaagagaacatgttccattcctgttcagagcttcagagcagc

SEQ ID NO: 203 - DNA, 1002 bp, Homo sapiens
ctctaaaatttcaccctctgttctgtacaccaagtacctcagcaagtaatccagttccagatgggatctgcagtctgccattaagtctttaccacacataggctcttatgctagagcccttaccatatggtccaaaatgccatttttaatgtgtatttgatatggagactctgttcacaatttgagtactaaagagagaataccacctcctagtagatacaccaggaccaatgtaatgctgtcattctaaggagagcagtggaacatctccaaagaacccatctgtagtcttccttcggcccttgatcttattcctattttatttttaaggtttttttttttttcttcgagactaaatctcactctatcacccaagctggagtgcagtggcatgatatcagttcattgcaacctctgcctcccggactcaagcgattctcctcactcagcatcccaagtatctgggactacaggcatacaccactatgcccagctagtgtagtgtgtgtgtgtgtgtgtgtgtgtgtgtgtgtgtgtgtgtgttagtagagacagggtttcaccatgttgcccagggtggtcttgaactccagagctcaggcgatccacctgccgaggcctcccaaagtgctgggattacaggcatgagccacagcgcctggccaatcttttagggataattttagaacagtatacagatattgagccaagagtcaaaagagctgggttgcaattctggttgtgccatttatcagttgtgtgaggtgggacaagtctctttttctccctagctttctctttcctcatttataaaataaagaaatgagaatgatagttgtattaatttctgaggactgccagaacaaattactacaaactgggtggcttaaaacaacaaacatttattctcacatagttcaggaggctagcagtttgaaatcaagttcttgacaaactcccctagagtctaaagtctctagagaaggattcctccttgcctct

SEQ ID NO: 204 - DNA, 971 bp, Homo sapiens
gagcaagcactgcagccatcctcctttatttccctcaaggcaatatccaaggattaaaaagtcagagccgtctgcagattcctcctctctaccttgccctgcactttttgtgcccttcctcttccccctctccagccccaaacctctctcctgatccacggtactcctcctgggatgtccactggggctgatcctcccccattctccccctgagttccctgctgttaatctgtctccagcaaaattaacctagcctatgtcccatgccctctggactctggctgctcgtcaatcactcttaaaaatccggtttctccttaggcaatcattttgttttgattttatgtgtaaaaaaacctgagtaaattttttttttttttgagatggagtcttgctctgttgctcaggctagagtacagtggcatgatttctgctcactgcaacctccgcctcccgggttcaagcgattctcctgcctcagcctctctgagtagctgggactacaggtgcccaccaccatgcctggctaatttttgtatttttggtagagacagggtttcatcatactggccaggctggtctcaaactcctgaccttgtgatccacgcacttcggcctcccaaagtaatcactgctgggattacagaagtgagccaccgtgcctggccaaacctaagtaaatgttttaaaattatactactaacatagcatacaggctttagactgttggttgcttttaagtttgcttactttaaaagctagagagaagatggttgaggtgatcttgtctccttcagtattcactctgagccatgcctcctgaggaagtttgctttaggggaggcattgctatgttatacactctacgatgcaccagcccttgcctcagaaggcaaggtttgaaccccaacactgtcttttgcaaactgttaccttaggaaatagattttatctccttaactcacttttta

SEQ ID NO: 205 - DNA, 974 bp, Homo sapiens
gttcaagcgattctcctgcctcagcctcttgagtagctgggactacaggtgcccaccaccatgcctggctaatttttgtatttttggtagagacagggtttcatcatactggccaggctggtctcaaactcctgaccttgtgatccacgcacttcggcctcccaaagtaatcactgctgggattacagaagtgagccaccgtgcctggccaaacctaagtaaatgttttaaaattatactactaacatagcatacaggctttagactgttggttgcttttaagtttgcttactttaaaagctagagagaagatggttgaggtgatcttgtctccttcagtattcactctgagccatgcctcctgaggaagtttgctttaggggaggcattgctatgttatacactctacgatgcaccagcccttgcctcagaaggcaaggtttgaaccccaacactgtcttttgcaaactgttaccttagagaaatagattttatctccttaactcactttttacatttgcaaaatgggtaaattgtgactacctcacatggatgtcatgagatgaaatgtaagaatgtgtgtccctggcatatagtaaccactttcgccaaagactgagttatccaactacagacagagaacagctggtggcctaatcaaagggagatacaaaataacaatgccaagactggaaaaggaagttcatcttaggatttccaagagaaaaagaaatatgactgtattataataggtatatttattaagctcttaccatgtgccaagcaaagttctttatatacatgatatacttcatatacattatttcatttagtcctcatggctaccaggtgagcaccattattttcccattttacagatgaggcacagagaagttaagccacttacctaggaagggcagtcctagttaagaagctgggattcaaatccaagaggctggattccagacctcagg

SEQ ID NO: 206 - DNA, 1002 bp, Homo sapiens
ttataataggtatatttattaagctcttaccatgtgccaagcaaagttctttatatacatgatatacttcatatacattatttcatttagtcctcatggctaccaggtgagcaccattattttcccattttacagatgaggcacagagaagttaagccacttacctaggaagggcagtcctagttaagaagctgggattcaaatccaagaggctggattccagacctcaggctctattatgagaagtacctaaatagagattggtttaaccaaagcctgagtcccaactaagggcaagactgtgacacagaggtcactaatcagaatgaaagattgagccagagttgagttgttggaatgtattttggtacatttaggttgttttaagtatatcaatctccattccactcaatggttgagttcagtttcaagttttccaaatgctttatgggaaagtcatatttttctcccattgcagcagggatgccagcgcagccatgctttctcaaccaccaagtagaagcaaagccaaactgacccaagaagatgaacagagggaatccagggagttccaacttgggttcacagctgcaattctcaaaggatggactaagccatgtcacccctccagataacacagtcatattaatagtgaccttttggaggcctccctaaacagcaggtgaagtcccaaaatcattagattattcctggcctcaattgtggcccagagggagagccctaagatttttccatgggaacaaagatctaaattctgggactatctgggccatgtccaccctgcaccatttactacaaaatgggctgatcctatggaagcacactacctgtgttgtggtcatatagatcatcacctggcttctccagggctaaccagttagcatggaaatgggacacccaagaacaagaggatagaaagaagggaagggtggaaagaaggaaggaagaaagggtgggagggagggaagagtggtagttttg

SEQ ID NO: 207 - DNA, 915 bp, Homo sapiens
tcctggcctcaattgtggcccagagggagagccctaagatttttccatgggaacaaagatctaaattctgggactatctgggccatgtccaccctgcaccatttactacaaaatgggctgatcctatggaagcacactacctgtgttgtggtcatatagatcatcacctggcttctccagggctaaccagttagcatggaaatgggacacccaagaacaagaggatagaaagaagggaagggtggaaagaaggaaggaagaaagggtgggagggagggaagagtggtagttttggaaggaaggagggaatcagagctaaagataatacatgatatgagtcagtgttcaatgtccctgaagattaggggaatcaagctttgcttccaggagaattaacacaggagagccaacagagatgtggaaatttaggaagtcagaggagacattctttcatctcattcattcgttcattcattcacttgctcatttttacatgaattgactctagaacagatgctggagatacaaagatgcatgagacttgcccccatcctcaacagtcattcacagtctaatcagaaagagagccttgcatttggaatacaatatggagtaataatacctctgtgttcagcctgcacaaaatactctgtatgcatggtcatatgtcccttgaaacaactttatgaggaagatactactatagtctccatttgacagataaggaaactgaggcttagggaggtcaaataacttgcccaagtaaaacaactagtaagtagctgaaccacaaaacagagattcatgcagaaagctgtacaacagaagaaaccaggactacatctgcctcaaaggaaccagagaaggcttccaaagaaggcagcattttaaatgggttttgaaggatgtatagca

SEQ ID NO: 208 - DNA, 864 bp, Homo sapiens
cccagccctcaggcacatcagtgccctctctaggctctctctcaccaactttagaattgaattacatcagttgtttccagatggtgatctgcagaattcctttaaagaccacctgtgggatttgagggaggaaaactacactctcccaatctccctctttaacccaagcatctgattgctttcatctgttttacatacttagcttctgtgcacaacttcctttgattaaagagttccttgcctttatagtagtggatgatatctaaggatgatgtaaaatactgggtgttagctaaggttttaccaaacttaaagcctttatgcttcataattccactttattgatgtaggaagacaaatgatagacttactttcaaggtggatagaagggatgcgacctagccaaggctacagcatttctctagtggcaccactgccatgacaaccatcagtttgaatgccttatgggtgcatcctatgggttatgcactggccccaagccataacccctaggactctagagccagcagcaaacacaaaacactgaattaataatgagtgagatctctgttcccatagctgccacaggctaaataagttgagggggtattgtaaaacccaagatgagatcactgagcctctggtatcaaaaaggtgtatttcacagaatgtttagttggacgagagcttgaagagcatggaaacgatctggtatcattctggtcaaagaccagaatttagaccccagttctgccatttgctgactaatgactttgggcaaaatacttaactttcctgagagttagtttcctcatctataaagtggggtaatataacccaccttgcaggatactggtaggatta

SEQ ID NO: 209 - DNA, 946 bp, Homo sapiens
agcagggtcccctgagcgttcctcctcagctcccaacacttccctccaggcaccagtatgcagggcaaggtcctggagggggcgccgaaacaccactcgagatcctcactctcaggaattcaatatagaaaacacattaagacctgtttacatggaactgctgtttataattattgttccctatgggatattccccactgcttcctccaatcctcttttaaactgctcaactaatagagttttcctggcttccccagggagacattcacagatgctaatagagacataattcaaaaattgcttgatatacatgccctcaattttccccaagaaccacctaagtaaagagccccagacatgcaacacattcattggccagatgcaatttaacatgcgtgggattaaatatacaggctactacagccaggttgtcatcaagcagcagcaggcatggcattttatcctaaggtaccaccatcggccaaatgcaacaggaaagaagcaggctgctgggtgggacccctggaagatcccctcctctgtaatttccactgcaagcttttcccaggccttttcaggcaaagcggggagttttgaaaataaatcccccaggcttggagaagcaaagaatcaatgctaagcagctccggaaataatagcttccatctctctgatatataaagaggataaggaaggcagaaagaaggggcatgatattatgagattgcaacaatacattgcaacattacattaaagaattacagaaagcaagatctagcttcagatgccagttcatgcacttactccctgtgtgaccctgggaatcacttaagctgtctgagacttagcttgtctaatgacaaactggggatactaatatcacctcccaggattgttgggaaggtaaatggagattgacaaatgtgaacacacttagtatgtcttt

SEQ ID NO: 210 - DNA, 877 bp, Homo sapiens
tgtttacatggaactgctgtttataattattgttccctatgggatattccccactgcttcctccaatcctcttttaaactgctcaactaatagagttttcctggcttccccagggagacattcacagatgctaatagagacataattcaaaaattgcttgatatacatgccctcaattttccccaagaaccacctaagtaaagagccccagacatgcaacacattcattggccagatgcaatttaacatgcgtgggattaaatatacaggctactacagccaggttgtcatcaagcagcagcaggcatggcattttatcctaaggtaccaccacggccaaatgcaacaggaaagaagcaggctgctgggtgggacccctggaagatcccctcctctgtaatttccactgcaagcttttcccaggccttttctaggcaaagcggggagttttgaaaataaatcccccaggcttggagaagcaaagaatcaatgctaagcagctccggaaataatagcttccatctctctgatatataaagaggataaggaaggcagaaagaaggggcatgatattatgagattgcaacaatacattgcaacattacattaaagaattacagaaagcaagatctagcttcagatgccagttcatgcacttactccctgtgtgaccctgggaatcacttaagctgtctgagacttagcttgtctaatgacaaactggggatactaatatcacctcccaggattgttgggaaggtaaatggagattgacaaatgtgaacacacttagtatgtctttacatagtaggtattcaataaactcttctatatatcttctctttctgaaaatctgaatatggggagcatggatatg

SEQ ID NO: 211 - DNA, 914 bp, Homo sapiens
gtccccaccactcctttttattgcagagggaattgacattcagggaatggaaatgcccagcccagaattggggatgtggtctgggaacccaggtctcccatcccactccctcgccctctcaccccctcccgctggtcagtgttctttgtcctctgctggcatccctggggacgggccagcccccatccccccgacacacacacattgtcccttcaagatggagccaggctgacaccacgtagaatgacctggaagcccccactcagtctaccagtcctccctcctcacacaggaatagatgggagggaaatgaaataagctgccatctgctgtgcatcctctgtgtgccatgctctgggtacccatctaatcctcgtgaagaccctgagaagtgagtgttcttcacagactaggcaacaccagaaggcaggatgaagaacgtacagaagctacagagtgcacaggtgacaggtatgagagccaagccattcaaactccctgggtataggacccagctcttcccacgtctctgcctttaccgaatcaaacacctgagcacggaagaccctccatcaacatgaactgctttgaattgacatgaacaagcttcaatcaaactataaatgctgaaatttttcaattatagaaagtatttgaaagatcccataaattcccctgtcatatcacgtgagctgcatttactgcagcagacactttttatctcgggcttggaggaaggattagcaagaagaaagtggagggggtctgaggaagggctggcagcctagaggaggacagcagcaagaagcaggctggaggcagttctgtgctgccggccttcatgggtgtggcctttggacagcaccttagcaggaatgtggtggagagcagccccattcactccagaggagagc

SEQ ID NO: 212 - DNA, 964 bp, Homo sapiens
aagaccctgagaagtgagtgttcttcacagactaggcaacaccagaaggcaggtgaagaacgtacagaagctacagagtgcacaggtgacaggtatgagagccaagccattcaaactccctgggtataggacccagctcttcccacgtctctgcctttaccgaatcaaacacctgagcacggaagaccctccatcaacatgaactgctttgaattgacatgaacaagcttcaatcaaactataaatgctgaaatttttcaattatagaaagtatttgaaagatcccataaattcccctgtcatatcacgtgagctgcatttactgcagcagacactttttatctcgggcttggaggaaggattagcaagaagaaagtggagggggtctgaggaagggctggcagcctagaggaggacagcagcaagaagcaggctggaggcagttctgtgctgccggccttcatgggtgtggcctttggacagcagccttagcaggaatgtggtggagagcagccccattcactccagaggagagcctcaaactcttcaggcagatctagcctaggtagaatcttggcctggcccctccgggatgacaggtgccattgcccaagaatggggaaaaggctgaagtgctccagccaaagaccccaatttatcttcaggacaattttcactggaaaccttgcctcaccactgcccactttttcagaagtaattagaatgctaatctataagaaagatgactattaaaaataaattaataatagataatacattttggcttacaattttgaataatatagccatcccatcttaaagtaaaaattcatatatttttaataagcctgagacatgttttccaatgaaccacagatggttcatttttattatcctataaagagacattatgggcaagtgttttttaaaatggtaaaacagaaccttagagcagctctctttt

SEQ ID NO: 213 - DNA, 876 bp, Homo sapiens
ggcaagtgttttttaaaatggtaaaacagaaccttagagcagctctcttttgaagatctctaagcactttctaagcatcaggacccccttctgtcatcacagagactgaaatgaggagatggtctctgtcaccccctcactcaccagtgagccccagaccttcatccctgatcagatggaagcagtgtggcatgattacagttcatatttcaactctgccactcaatgactaatagccaagcactaataatgcagaaaatgtaaatttaaaaaataatcttcctgagattggttatgaaatgcactcaacacagcaccatccacagagaggttctttttaattgctcttttctttcctctcgacacccagaatcacaaagcatgcctgaaagcgtcacacatatatgtctgtgaccataacatggcattgcacatgcaaaggaaataaagtaggtgttacccatgtgacaaaggtccatgagctctgtccgcaaaaagctgttgagtttaaagaacaaataattctgaaaaatcttccaggagatgaaatttgtagaactcaagggcagtaaactagctgctttccaaggacttgtcatagctttattgacttacaatagccaaagataagtcagtattaatcaaacccattctctagaaaaacctcatcatcactggggccagggcagagaagtgtgacacagctctctccagcttccccacttcacagcatggttccaccatccacccaattgctaaagcctggatagtcttccttgtcacctcccgatccccttctctaacacccatcccccggccacccaacatcagcaagtctggtggtttctctctgtcacagagattcaagatcttccc

SEQ ID NO: 214 - DNA, 910 bp, Homo sapiens
tcgtagtgttcatagactctccttccttcctaacttaaaagaggctccttctggtttttccttcatacacttccctcactcttttccttcactgcactaaagatgatttctaattgcatagtcattgatgccagtatttgtttattgtgtcattcctgctgaacagaggatgggcctgacttatttgggaccatgttgctgatgcctggacctaagcctggcacagagtaggagctcaacaaatttgttaaatgagtggctgaatggccatactctcaaaggacccacagtctaggagagacagaagaatctttgtctttttgtcttgcagtgggatggaagctgcagggaggggtcttgtcacattgatactgtctggggaagacagaaaaacttcagtttcagaggaggtagcccttgaaacgaagatttgagagagggcagcacattgtacaactccatgggcaccatgcacattgtagtccagataaacagagccccttggagatatgtgaggcatgggatagactcagagaaacccaggaaataaccccttcaggcatctgacatgcaaagatgtggaagtgtcaaccaggaagtcatgttgggggaacagcaagtatttacagaaagtgactgtgtgtgtctgtgtaggagggtgactttgtataggagagataaaacctgtgagctaatcaaggagaagatcataaaagaccttcataaagagcatggcctttttcctgcaagcagtgaggagccattgaaggctttagcataaggacagtcagatgtacttccctagaatgcacatttccttctgctccagaacttctgcacaggaggctcctaaaagctctccccatcctccctgtacacgtagaatctgcctctgtctctctttctctct

SEQ ID NO: 215 - DNA, 877 bp, Homo sapiens
cacttccctcactcttttccttcactgcactaaagatgatttctaattgcatagtcattgatgccagtatttgtttattgtgtcattcctgctgaacagaggatgggcctgacttatttgggaccatgttgctgatgcctggacctaagcctggcacagagtaggagctcaacaaatttgttaaatgagtggctgaatggccatactctcaaaggacccacagtctaggagagacagaagaatctttgtctttttgtcttgcagtgggatggaagctgcagggaggggtcttgtcacattgatactgtctggggaagacagaaaaacttcagtttcagaggaggtagcccttgaaacgagatttgagagagggcagcacattgtacaactccatgggcaccatgcacattgtagtccagataaacagagccccttggagagtatgtgaggcatgggatagactcagagaaacccaggaaataaccccttcaggcatctgacatgcaaagatgtggaagtgtcaaccaggaagtcatgttgggggaacagcaagtatttacagaaagtgactgtgtgtgtctgtgtaggagggtgactttgtataggagagataaaacctgtgagctaatcaaggagaagatcataaaagaccttcataaagagcatggcctttttcctgcaagcagtgaggagccattgaaggctttagcataaggacagtcagatgtacttccctagaatgcacatttccttctgctccagaacttctgcacaggaggctcctaaaagctctccccatcctccctgtacacgtagaatctgcctctgtctctctttctctctcctcctcctcctccatctcctcctcctcctcctc

SEQ ID NO: 216 - DNA, 902 bp, Homo sapiens
gctccagaacttctgcacaggaggctcctaaaagctctccccatcctccctgtacacgtagaatctgcctctgtctctctttctctctcctcctcctcctccatctcctcctcctcctcctctccctctctctcgctgtctcacacacacatacacacacactccttccttcctatctagtcagattccactccttgggatttcaggcccaccgtcactcctcagggaagcctgccctgaatgcctgcactacaccagggcccctttcccctgcccccatcccagagcaccaaatagctttcccttgcagcacttctcacagctgtcattttatgtttgtgtctgtgattcttaggttaagtccctcatgcaccaaatcataagatctgggaacaaggaccacacctgtcctgcttcatcactgtaatcatcacactgcctgccaaagtgccttgcacatattagatacttagtagttatgtgttccatgaatgactctttaagagatcttctagctgttcttgcaaagaacccattggtaaggttgaacctacaggctgatactttgcactagtctcaggaagagatggtgagtacatgaaattgagtcccccagaggttaatgcccagtgccccagctaggaaacgtccaaggaggcaatttgaaccccatctgtctggctgcagagcctagccctctaatgcattcaggggtcctagctcctcgaggatgccactgtgccgtgaacttctttctgaccctcatggctcccagcacagcatccacactcagaagtgcaagatgaatgtttgcagataatgaacataaagctctcaggaaccctcatctcctgagaatctgctttggcccccacagcaggtctgggtgtggaccttcccca

SEQ ID NO: 217 - DNA, 1002 bp, Homo sapiens
gtggcaaagttgggatcttaacccagttctatgtggctataaagttcatggaatagaatgctgcagttaagaacatgggctttggcatcaagcagacctgtatttgagccccacctctgctgtttattaactgtggccctgggcagatgaccttacatccttaagtctctagttctttgtctttaaaagggtggcagaatgtacctcactggttttaggaaggtcacatgagatagtgcacatgaagccctaggcatgggaaaattcttctaaaatgtcagctgccattctgatcactgcaagacccccacccccaatactcccaattgtaccaccccaccccactcaccagtgtctcagaaatgcctcctccagaaggaaggcatcctgtctaacccactgcttctagccaagctgtctttcttcagaaggtagaaaaagattgttagtcattgtttaatctttattgagtatataccgccacaccaattgcactgccacttcattatctcatttaaatctgacaagagccttgtaaagtagggattattcccaccatttcccagatgttgaaactgaaattgataaacacgacatgttgccatggctacatgaagatctccaagccggaggatctccaccctcacctgcctagcttcccagacctctctgcagaaaagggactgacccccaagacagccctggcctctgggctccaccccttccacatccatcccagggccgctgaggactgaagagttctccacgtttgccctttaaagtgacttaaaaataatctttatgaatttcttcatatacaaaatttgtacttactcattgcagcaaatttagaaaatacacataagcaaaaaagaacgtaacagccatccataaccctaactctcagagatcaccactattaaaatgtttattatctaagagagagatgatatagacaaagatgagacagattgacacagagaagatgggtacatgatagat

SEQ ID NO: 218 - DNA, 1002 bp, Homo sapiens
tgctcaactgtaatcaaacattatttttaaaaaatcattccagcctgggaaacagtgagaaacccatctctacaaaataaaaaataaaaattagcttggcattgtggcatctgcccgtggtccctgctactcaggaggctgagatgaaaggatcacttgagcctgggaggttggggctgtggtaagccgtgattgccccattgcactccattctaggcaacagagtgagaccctgtctcaaaaaaaatattattcatttaatatctgttgccaccacaggactgatccctctgtgagggcagagattgttcatgcatggaattgtgatttataagcactggctctggagccaggttgcctgagcacggagccagctgtgccctgcgggacacctgtggcacacttcactcctgggacacctgggacacgcacacaatagaaatgttcacattttactaggcaatgccagtcacatagtcctacctaatttcaaaagggtaagaaggtacacccaacacgcatcaggaaggaggaggaccagaaattgttggtgacaagcacaaatgaccaccccaatataatattttgtttggaaggcattttattccacaaaaacaacattacaataaacacaacaacaaaacactggttgcagtagaaccaactttccagacctatctgcacagcacaaccattatcccactcaaaatgtcatgtttttacccaaaacattaaaattttaaaagcaattcaaacccatagcttaaaaaatgttccaaccagtaataaaaggaaaagtgtgcctcctcctcccaacttccctaccccacaatcgcaagatattatccttataggcgaaaagggtttcaggatttgagatgcaggctgggaggtctgagaagacttcctatagaagacatgacttcaaactctttcttgtatgtgagatttaattttcaaagactcctctgatccaacttaagctttatggtaaatcacctt

SEQ ID NO: 219 - DNA, 1002 bp, Homo sapiens
atatgccagcgctctatctgcaggggttcttttgatagcagcagactgagagatgatgttactgtcccctttttcctgttgttggcaactgagactcagaggatggaagtgacttgctcaggtccaccacctcttcagctgtggagctgcgacaggagcctttgtttgacttcaaagctcaccatcactcctctctcactgatgctcaagtgggctatcacctcgcctttcctgagccttccttcgctatcctaaaacagcgcctcccgaaatcaccactaaagaacttattcatgtaaccaaacaccagcggttcccctaaaaacctatggaaataaaaattaaaaataaaaacagtgcctcccatgacccatgtctctccagtcccataactctgctctatttccattcacagctccatccccacctttatgtcttttgttcactgctttatccccagtgcctagaagagtgcttggcacctagtagacactcagtaacgtatttgtcgaatgagttaataaggttgtgaaaagaacgttagattactggaaggattcatctgagtttaattctgctatgctgggaatccagtgtgcggccttggatgaagccagttccctccctgggccccagtagccacatctgtacatttagagggcaggagaaaagccacacgctctgtgacttatacaacttgttgcccagagtggaggctgctttgatgctcagaaaaaagaaacaaacatggaaatgctaaatgggtggcagagagcttgagggaggaaggagatggggagggtactcttgaaactgtttggtgtcttccctcctgccccctcagtaccaattgtcaagtacagaaagtgaaggagacttgtattagtggaatttggtccctgacttgttatagagacacaattacaaagacacaagagtgggcccagcagagacccttagggtggtcccttgaggttccaaagcatctgcccatcaagcaga

SEQ ID NO: 220 - DNA, 1002 bp, Homo sapiens
caccagcggttcccctaaaaacctatggaaataaaaattaaaaataaaaacagtgcctcccatgacccatgtctctccagtcccataactctgctctatttccattcacagctccatccccacctttatgtcttttgttcactgctttatccccagtgcctagaagagtgcttggcacctagtagacactcagtaagtatttgtcgaatgagttaataaggttgtgaaaagaacgttagattactggaaggattcatctgagtttaattctgctatgctgggaatccagtgtgcggccttggatgaagccagttccctccctgggccccagtagccacatctgtacatttagagggcaggagaaaagccacacgctctgtgacttatacaacttgttgcccagagtggaggctgctttgatgctcagaaaaaagaaacaaacatggaaatgctaaatgggtggcagagagcttgagggaggaaggagatggggagggtacctcttgaaactgtttggtgtcttccctcctgccccctcagtaccaattgtcaagtacagaaagtgaaggagacttgtattagtggaatttggtccctgacttgttatagagacacaattacaaagacacaagagtgggcccagcagagacccttagggtggtcccttgaggttccaaagcatctgcccatcaagcagatgatgtgattagtctctgtgaccccaaggatgcctcctgaaattgctgattcaatttctcctaataaaataggaacaataattagctaataagaaatcaacaattaaagctatgagagaattaagtgagatcatgtaagcaaagtacatgtcacagtgctctgcaaataggcagtgctcagaagtgtcaccttttctctttcttctctgagcctccgtcttctcttcggtaaaatgagaataatattatgcatacctcacaggggttaagcaatgtgaaagtactctgtaaagtataaggctga

SEQ ID NO: 221 - DNA, 1002 bp, Homo sapiens
gagatgatcaacagtctttcatccagagggttgtgtttgctggtggccattacctttaacataaaacgatcatatttactttatcctattcatgtccaacctcaactgacaattgagttgtgtctctgacaataaatagcagaaaaaggaaatcttcctatactgaagagaaacacaattaattaactagatccatcaggaaaggtacaatcatgattgagacagtgtttaacagatgtgactattggattctgttgttgagaatgacccttaaaatcacagtcaaaatatacgacaagatggaaataacatttttgagcacctactatgcatgtagagcatcttacataccttatctcacttagatttacagctgcaaggtgggtatgattctagcttgaattagtctaataaccatatacctcctaggggcagtgagatgattagatcaattctaaaactattaccatgctctctgagctcaccaagacaggcagttaagtacaaggatacattaataccgaatccagcaaaagctcacatggccagcttccattatgttcctatttgtgattattctgtatcaagcacagaaatgtatgttcacacgaacaacaaagaaggggtttattagtgtggattacagggcctaagcctaccctctgaaactggttttggagtctttagcacgcttgtttgggacagttaaacatgtgccagctattctaaaacagtagcagtaatgtgatagagctgggtcataccgtgcttcccaaagtatgatcacttcatttcaacaacttcacactaacagcctgaactgggctgtgaagggaatatttagaccaaggaaactggaaaactgtatcaatcaggcttttccaccctccccaagagccagttgtcagatatctaccagcctaccaacgctagctctctaatcagaaaccatcacttagcaagttcccaaattatctgcagagcaatgaactcctcttcttc

SEQ ID NO: 222 - DNA, 1002 bp, Homo sapiens
ctatgcatgtagagcatcttacataccttatctcacttagatttacagctgcaaggtgggtatgattctagcttgaattagtctaataaccatatacctcctaggggcagtgagatgattagatcaattctaaaactattaccatgctctctgagctcaccaagacaggcagttaatacaaggatacattaataccgaatccagcaaaagctcacatggccagcttccattatgttcctatttgtgattattctgtatcaagcacagaaatgtatgttcacacgaacaacaaagaaggggtttattagtgtggattacagggcctaagcctaccctctgaaactggttttggagtctttagcacgcttgtttgggacagttaaacatgtgccagctattctaaaacagtagcagtaatgtgatagagctgggtcataccgtgcttcccaaagtatgatcacttcatttcaacaacttcacactaacagcctgaactgggcctgtgaagggaatatttagaccaaggaaactggaaaactgtatcaatcaggcttttccaccctccccaagagccagttgtcagatatctaccagcctaccaacgctagctctctaatcagaaaccatcacttagcaagttcccaaattatctgcagagcaatgaactcctcttcttcagaaagcaggctgaaagatacactgttcacatcttagcctgacctggacccagtgagtttccatcagtgagaaaattctgtgctaacttgagataatactattcttgtggcaattttacttttcctttgagcgattccttcaacctctctctgccccttcatttttccgtcttaaaactaaaagtgccctttctccctggacactcctcatttgcaatgaattgtcatttcagctcctcagtcaagaggagtaatgaaatcccacccgtgttaatcctcttatatcccgcagaaatattgtagacccactcaccctaggcaacat

SEQ ID NO: 223 - DNA, 1002 bp, Homo sapiens
agtaatgaaatcccacccgtgttaatcctcttatatcccgcagaaatattgtagacccactcaccctaggcaacatgccctctctcttcaacacaggtcatcaattgttcatttactggctatctccatgtactggaacttcagggtggtgtccagctgggttcaaaggagaaacagtgggaagtttctccactgccacctgaattagatgagaaagagttgtctactgaaatacactagctggtggcaggattgggacgtcatttgactaattgcctcctagagctgcagagactgctggaactacctaagtaaatcatcaaaaaaaaaaaaaaaaaaaatcatcccagggcactttttccagacaaaaaggtccacttaaaacatcctctagagatctgtgcctgaagctgagctgctgcaatgaaactgacatttctgccttgcagcctggccatgggcttagctggactaaaatgctgctgcagtggtgagggcacagtgagagtccctaatgtacatggccttgctccttgtcctgacacatcttttagggctgctgctttctctagtgctggaatctagataattcctttcccagccgtttgtttcttcaatcttggaaaatatctggatgaatgtaacactgtcacacacaaacagaattatgacttacgtcacattctatgtcgtgattttgtggacttttaataattgcattacatttgtgaccattaatttccaccatcgccctgctcctgagaatctgtaagggacatttgacactcctctccccacccacctcaacatttgtgctgacctgaaggtcacattaaaaacatacccatttggagagaaagatctgtctactgaaatacactaaatattgaagaatttccaagtcatttgatcttgaaaactccatctaatggaagcagaaacactcaaaggtttttttttttggactccctttttcaggacactttcaggactgaggtatat

SEQ ID NO: 224 - DNA, 978 bp, Homo sapiens
tcagactttgaacaaacctcagaaggaactgtcaaggaggctccccacgggttcacgctcttctctcctcctgcacacagggaacagggccattctccttcctttactgggactacctgggcttcatccagggaatccccaggtggcaacaggagggtggtgaaaaccgctgcccgtcacctgtaaagtttcctgtgaatgtgtctacagcggccagcaccacaaggcatacaaagaaagggaagggagagctgatgtgagagcggcagcgtgggcactcctgtgaggttgccacagctgtagacaagttaaatcagtgcagttcaatcaaaagtcatgacccatgagcgtcacaaccagcacgagtctacaaaggaatacattaaaactaagaccagagcacagctcacattagtgagggatgggatcatttcatggagtttttgtttcaaaatatttcattaacatttcacttatatacatgtgtgtatactgggttgtgatattaaattacaattcttactataaaatacagcaaaagaaagaagaaacaaagagagggccactggtttacctaacatccacaggcaggctacttcccagcatcttgagccccaaagaagtaaatttccttccacaaccgatgttaccacagcctgacacttagccaatgatgaaaacgaaaaacaaaacaaaagcttggcagtcagtatccaaatatgcagatactacagaatctgtttgatgtagaagttgatcctgctacccagacagcaaacaactcatttattaataaagtccagttcctccttaatgaagtgggtttaatagttgatatctcaataattacttagtgcattttttatgaaggtgatgggaaacaagtgctgtttcttgagtcggaaagagtctctcaagctcccacaaagaaatttcccgagcttgtgaggaattcagtcacaggaagatcaaggaatt

SEQ ID NO: 225 - DNA, 2002 bp, Homo sapiens
gatctaatgctaggagattcaaaccaacaattaatttctctgttaaaatgggttaaaatagatgtaaaatattaatatgtatataagcattctgaattagacttatgtgaatttttctccttttctttctttctttttgagaataagccctttcatttacgtagaaatgcttcagcgtttagataattgctacttatcttgttagctacaaacacaaccataattaaaggctctgtaagaattatgaattctggggaaattggccacttgtctctgtggcgtaaacagtatctaatttataacaaatcatctgccttagtcccagcaggataaggtgatatgtattgcccagcacatgagaaagatggcaattaggaattgttaccaagttacgggagcctcacacgaacatccatcacctttggggatatgtacaagatacaaacttaatttgatggattccttttgtattgggatcaaagtctcaaaagggaaagtgacaatttcagggaaaatctggtgcaatgagaccaacactgatgagagaaatgcacacaatttaatacacctgctcacctgatgtggcaactcagcctgtgcttgctgtgggttgccacaggatgagacatggtctgtgcatattcccagcagccacccatctcatcactattcttgccagcccagatttacagttgttcaatagatggatttggtaatatctgcatgacaacaacaggcagagaaggttagatggcaattgattcttgattggtgtaagtttatagaacacattctggcagggcccaaaggaaatcactcacctacccctctgtgatggtaaaacgttgaaaattccacggacttggaccttgtgatccttcagtggaagatgggcagattccttgctttaattgacagacactttctaaataactaatgcaatcttatattacattatagtccataagggagacatacttaaactactacttacaacaacgtgtttttagagcctttcaaatggtttgtacaaagtagctcccatttaagatattttcctagtatttaaggctatctagtagacattacaaaacaatacgctgtaaatacattcagatttttatcagtaatacttaacatgccgtaatttgaactttctgctaaatcatgctatccattcctagttggccccaatggtgagagtttactgtttctttaaataattttgtttccctttgctgtctagaggtgtttatcattctgcttacttgcctgtgtctctggaatattcagaaggttccatgggaaacaatttgaatatgcaaagaagttatttttaaagcaaggaaaatgttttcatatggatttattttgagcacttctgcctttgcctccactgggaacatgtttctctccaacgccgaagccccctccctgtgtggtgtttgacgcagaggctgacagggcagggaagtggggttcaagataggaaggccattggcagtgtgaccccagcccacagtcctagatcccaggtcgtgacaccactcttttgacagcccagattgttacctaacaagaatgactcccaagctcaaccattccaatgccatctcctctggttccagataagattgaagatgagctggagatgaccatggtttgccatcggcccgagggactggagcagctcgaggcccagaccaacttcaccaagagggagctgcaggtcctttatcgaggcttcaaaaatgtaagacccgtgcacgctctgaaggcctggggggggttcccacgtgaggctacactctccccaatgccaagggagctcataaggcgtttcccatatgtgaggctgtacaaggaaggccagctctataaagggggcatgagagggagatcacctggctagaaaggaaggctccaggcgaggatggagcaacctcaggagacagtaaacggccaactgcccagaaatttcacagggtggcacatcctcaag

SEQ ID NO: 226 - DNA, 1002 bp, Homo sapiens
gatttttatcagtaatacttaacatgccgtaatttgaactttctgctaaatcatgctatccattcctagttggccccaatggtgagagtttactgtttctttaaataattttgtttccctttgctgtctagaggtgtttatcattctgcttacttgcctgtgtctctggaatattcagaaggttccatgggaaacaatttgaatatgcaaagaagttatttttaaagcaaggaaaatgttttcatatggatttattttgagcacttctgcctttgcctccactgggaacatgtttctctccaacgccgaagccccctccctgtgtggtgtttgacgcagaggctgacagggcagggaagtggggttcaagataggaaggccattggcagtgtgaccccagcccacagtcctagatcccaggtcgtgacaccactcttttgacagcccagattgttacctaacaagaatgactcccaagctcaaccattccaatgccatctctctctggttccagataagattgaagatgagctggagatgaccatggtttgccatcggcccgagggactggagcagctcgaggcccagaccaacttcaccaagagggagctgcaggtcctttatcgaggcttcaaaaatgtaagacccgtgcacgctctgaaggcctggggggggttcccacgtgaggctacactctccccaatgccaagggagctcataaggcgtttcccatatgtgaggctgtacaaggaaggccagctctataaagggggcatgagagggagatcacctggctagaaaggaaggctccaggcgaggatggagcaacctcaggagacagtaaacggccaactgcccagaaatttcacagggtggcacatcctcaaggaattcaccctggcccagggtcaagccttagcccttaacataatcataccttccaacctggtggtgcccccacaataatgggatttggccctgctgacttatgctaaccaggct

SEQ ID NO: 227 - DNA, 2002 bp, Homo sapiens
ggcagggcccaaaggaaatcactcacctacccctctgtgatggtaaaacgttgaaaattccacggacttggaccttgtgatccttcagtggaagatgggcagattccttgctttaattgacagacactttctaaataactaatgcaatcttatattacattatagtccataagggagacatacttaaactactacttacaacaactgtttttagagcctttcaaatggtttgtacaaagtagctcccatttaagatattttcctagtatttaaggctatctagtagacattacaaaacaatacgctgtaaatacattcagatttttatcagtaatacttaacatgccgtaatttgaactttctgctaaatcatgctatccattcctagttggccccaatggtgagagtttactgtttctttaaataattttgtttccctttgctgtctagaggtgtttatcattctgcttacttgcctgtgtctctggaatattcagaaggttccatgggaaacaatttgaatatgcaaagaagttatttttaaagcaaggaaaatgttttcatatggatttattttgagcacttctgcctttgcctccactgggaacatgtttctctccaacgccgaagccccctccctgtgtggtgtttgacgcagaggctgacagggcagggaagtggggttcaagataggaaggccattggcagtgtgaccccagcccacagtcctagatcccaggtcgtgacaccactcttttgacagcccagattgttacctaacaagaatgactcccaagctcaaccattccaatgccatctcctctggttccagataagattgaagatgagctggagatgaccatggtttgccatcggcccgagggactggagcagctcgaggcccagaccaacttcaccaagagggagctgcaggtcctttatcgaggcttcaaaaatgtaagacccgtgcacgctctgaaggcctggggggggttcccacagtgaggctacactctccccaatgccaagggagctcataaggcgtttcccatatgtgaggctgtacaaggaaggccagctctataaagggggcatgagagggagatcacctggctagaaaggaaggctccaggcgaggatggagcaacctcaggagacagtaaacggccaactgcccagaaatttcacagggtggcacatcctcaaggaattcaccctggcccagggtcaagccttagcccttaacataatcataccttccaacctggtggtgcccccacaataatgggatttggccctgctgacttatgctaaccaggctcaccgagactgatgtgtaagccgaatgtcggtgtattaatttaccttgggaaatggaactgacagtggaaacagacactcctctcccttcgctgggacccgctctccttggaagccacatggaagccaggttacaatcaaaagtggagtcagaggacgggagttccttgtttagttgttactttaaatacattaatgtgttcctgcagtctcaggccagtttgagagctctcagatacaatcctggatattaatttattttttaagtttaactctcagagtgcaatcttattcccaaatcctggagtggtgtggagtggggtgggctacagcgacatgcacctggtcaccctccctccaggtgcagtctgtaggtagagctgagctgggtcagttccaaactgaccacagcctcaatgttctccaaactgctgacccacagggattccagcccctcctgggagttatctgacaggtgctgggatgcctcttccttccacactagccttgactgcacatgccaagtgcccagtttcctaccattagggcttctttccttcgatggcagcattagcagtgggcagccgagttggagaaggatcctgtgggaaagttttccaggcaggcactgggctcagagggaacagcatccagaaaagagaagaaatctacactgcttggc

SEQ ID NO: 228 - DNA, 1002 bp, Homo sapiens
aatttaccttgggaaatggaactgacagtggaaacagacactcctctcccttcgctgggacccgctctccttggaagccacatggaagccaggttacaatcaaaagtggagtcagaggacgggagttccttgtttagttgttactttaaatacattaatgtgttcctgcagtctcaggccagtttgagagctctcagatacaatcctggatattaatttattttttaagtttaactctcagagtgcaatcttattcccaaatcctggagtggtgtggagtggggtgggctacagcgacatgcacctggtcaccctccctccaggtgcagtctgtaggtagagctgagctgggtcagttccaaactgaccacagcctcaatgttctccaaactgctgacccacagggattccagcccctcctgggagttatctgacaggtgctgggatgcctcttccttccacactagccttgactgcacatgccaagtgcccagtttcctagccattagggcttctttccttcgatggcagcattagcagtgggcagccgagttggagaaggatcctgtgggaaagttttccaggcaggcactgggctcagagggaacagcatccagaaaagagaagaaatctacactgcttggcatctaccatggactcaataccacctaacataggttcataagatacccttggggaagttattgttacccccattttacaggtaaggatattgaggatcagagactggcttggccaaagtcacaaagcttagtattggctgagccaggatttaaacccaggtttttctgatcttaaagccccaaatctctccacctcacagtgcccattctctgacaatgtctcatcattttgcaaagcagctccagtcctgagatggcactacttgggagaagtggaaatgcacaggtccctgtccctggggatcatgaggaaccccagacaccaaggctgggcccagtcttctcctagtgctggccc

SEQ ID NO: 229 - DNA, 2002 bp, Homo sapiens
ggctcaccgagactgatgtgtaagccgaatgtcggtgtattaatttaccttgggaaatggaactgacagtggaaacagacactcctctcccttcgctgggacccgctctccttggaagccacatggaagccaggttacaatcaaaagtggagtcagaggacgggagttccttgtttagttgttactttaaatacattaatgtgttcctgcagtctcaggccagtttgagagctctcagatacaatcctggatattaatttattttttaagtttaactctcagagtgcaatcttattcccaaatcctggagtggtgtggagtggggtgggctacagcgacatgcacctggtcaccctccctccaggtgcagtctgtaggtagagctgagctgggtcagttccaaactgaccacagcctcaatgttctccaaactgctgacccacagggattccagcccctcctgggagttatctgacaggtgctgggatgcctcttccttccacactagccttgactgcacatgccaagtgcccagtttcctaccattagggcttctttccttcgatggcagcattagcagtgggcagccgagttggagaaggatcctgtgggaaagttttccaggcaggcactgggctcagagggaacagcatccagaaaagagaagaaatctacactgcttggcatctaccatggactcaataccacctaacataggttcataagatacccttggggaagttattgttacccccattttacaggtaaggatattgaggatcagagactggcttggccaaagtcacaaagcttagtattggctgagccaggatttaaacccaggtttttctgatcttaaagccccaaatctctccacctcacagtgcccattctctgacaatgtctcatcattttgcaaagcagctccagtcctgagatggcactacttgggagaagtggaaatgcacaggtccctgtccctggggatcatgaggaacccctagacaccaaggctgggcccagtcttctcctagtgctggccctcaaatgcctcccgctgactctctccccttcccacaggagtgccccagtggtgtggtcaacgaagacacattcaagcagatctatgctcagtttttccctcatggaggtgagtctgaccttgaaatctatcttgcccagctccctctctggtaagcagccttcccttcctccaagtcctctcttccttgccatttgcttccttctcgaggaagagacaaactcagggcaggacacctccctcatcgtgagaggtgggagtctccaaagctttagcaggaaagaactctgaaaatgaacccaccctggaaggggaagaagggctgataatgcaacatcacaacgtctcagaacagctctagaaagcaggtattataatcccagatggagtaactgagtttcggggaagataagcagtgtactcaagattgcacagctggtgagtagcaaaccaggattagattccataagggtctgaaacaggttttgccatgctggcaccaccattgtgcagggcacttttgaatcttttccttaaaatagctgagacaagctggaattttgtaaaagaacttcagtaaataccgaagactataaaaataaactaattgaaaaagaggcaggaaacataaagttgtgcttattaagccagtttacaagtgtgccaggcccacaacagctgctctgttgccctgcccgactcctgtgggaaccagctgtgtccccatgggcctgggaccacatcggtgactcctcctgtggcctccatgtgtcacatgccactttgcatcctgtcaccaagagctgtctcctgcaagacatcttccctggatcctgacaaaatgcaaatccaagtattccaaacacttcttgggccctgtttctcatgggcctttttggcagcagacagatgccttccttggtgtgtggggcccctacccagatcaggtgggggaggcag

SEQ ID NO: 230 - DNA, 1002 bp, Homo sapiens
cctctggttctgcatcacctccccctctaaatctcaaggcattgggggaaggtctggaccatcaaaagctctcagtcagaccaaagacatgtttatccatttgtaagcatttcctaaagatggggaaaagcagcagcaactttccctggcctgcaggaactcagggactcaggggactaataacaacagtgtatgagcttccgggcacactgcttcccagtggcagcccctgtacttagggctttgtatgtattaattcatttactccaattcccacaataaccctatagggtagggttttattattgattacctttttacagaagaggagagtaaggcaaagagagatagagtagttttcccaaggtcaaagagcacataaatgataaaggatggatttgaatgtaggcagaatgaccctcaatacagactgttcctacagtccacgtcctcagccactagaccatacggccactgggatgatagacagaccactgcagcgcatggataaggcaaaaacagggctggctgtgttgatctgtgtctctcagagctccattcttcctcaagggggcaccttgcaaaaaaaaacaaaaaaatggggcagggtagggaactgaaggcaggagctcttcacagagcatagccacatcctccaggcagacaagaggacgcaggaggcaccattctgtgagagtatcacagtctgacccaaagacacagcttcacactgtctgatggcttgatggttaatgtcactctgccttttccccttctcaggactttgtaaccgctctgtcgattttattgagaggaactgtccacgagaaactaaggtggacatttaatttgtatgacatcaacaaggacggatacataaacaaagaggtaagtgagctggggccaggggtgtgagagggctccagtgaaggtaactaacccaacagaaaacagccccaggcatgaggatagcactgtctgaatgaggcaggctctgctttg

SEQ ID NO: 231 - DNA, 2002 bp, Homo sapiens
tgtgccattcatacaccaacgactccatgcatagacaggcaggagaatggttttctcatgatggctagagggaggggcaagggctcatctcactttttgctagatctaacttcacacccaaacccaaagagttgagtcaatgggccccactccataattttctcctttccatcaccctagcatcactctcctctctttcttgtcgaagccctgccttgtttggaaggttctccctgtgtggaattcctgcccccatcacctgccctccttttctgccttgtagatgccagcacgtatgcccattacctcttcaatgccttcgacaccactcagacaggctccgtgaagttcgaggtacgctcatctggggtccactctaggggtcctctggttctgcatcacctccccctctaaatctcaaggcattgggggaaggtctggaccatcaaaagctctcagtcagaccaaagacatgtttatccatttgtaagcatttcctaaagatggggaaaagcagcagcaactttccctggcctgcaggaactcagggactcaggggactaataacaacagtgtatgagcttccgggcacactgcttcccagtggcagcccctgtacttagggctttgtatgtattaattcatttactccaattcccacaataaccctatagggtagggttttattattgattacctttttacagaagaggagagtaaggcaaagagagatagagtagttttcccaaggtcaaagagcacataaatgataaaggatggatttgaatgtaggcagaatgaccctcaatacagactgttcctacagtccacgtcctcagccactagaccatacggccactgggatgatagacagaccactgcagccatggataaggcaaaaacagggctggctgtgttgatctgtgtctctcagagctccattcttcctcaagggggcaccttgcaaaaaaaaacaaaaaaatggggcagggtagggaacctgaaggcaggagctcttcacagagcatagccacatcctccaggcagacaagaggacgcaggaggcaccattctgtgagagtatcacagtctgacccaaagacacagcttcacactgtctgatggcttgatggttaatgtcactctgccttttccccttctcaggactttgtaaccgctctgtcgattttattgagaggaactgtccacgagaaactaaggtggacatttaatttgtatgacatcaacaaggacggatacataaacaaagaggtaagtgagctggggccaggggtgtgagagggctccagtgaaggtaactaacccaacagaaaacagccccaggcatgaggatagcactgtctgaatgaggcaggctctgctttggggctaacagagctggtccctggcaaaataaagaaggcctccctcattgccctaccctgccctgttcccaagcgcccagaaaggattaaacagattcattctcactgggtcacctagattcagtagatattacacagtggataaaaatgacttgtttcagtgtgaagagttactcttccctagggaacctgcatttgggaaggttaggagccacaagtcaaagctaaaagttgaaatggtggaattgtaggcagcacctagaatagaaaagaaagatttttaaggaagaggaacctacaattgggtcatattggccttaaactattttgcctattaatacaaccgccaagggggtaatggaaggtacagctgtctttacagaaattatcacaaataatttctgaatcttcactgctttgcacttttagaacctcagaggacatgtctctagccagtgaaataccctcaggtctatctcaaaactcactttggtatccactgtatcctggtatctcagtggaagctggaaattggcatcctgtaacactccacttgctgagctcctgtgtgccaggcacggtgcctggaggtatagatatcagcaccaatcttcacc

SEQ ID NO: 232 - DNA, 1002 bp, Homo sapiens; identical to SEQ ID NO: 136

SEQ ID NO: 233 - DNA, 2002 bp, Homo sapiens
atttcttaaagtagataaatttgactttatcaaagttaaaaattttgtgctttagaagacacctttaagaaaatggaaatgcaagccatggacttggaaaaaatgtttgcaaattatataccagatatataaagataccaggataccaaaccaatataaagactggcatccaaaatatataagggacatttataatttaatacaaagataaacaacttcatataaaataggcaaaagatttgatgagatatttaagaaaagaagatatatgaatggccagtaaacccatgaaaggttgctctatatcactggtcttcaaagaaatgcaaattataactataatgaaatacaattgcacagaatggccacaattaaaaagactgataataccaagcattggcaaagatgtggagcaatagaaactctcatagatagctggcagaaatgtaaatggtacaaacacgttgggaaacattttggcatctttgataaagctcagcacacacttaacatacaacccagaaatcccattccagtcaggcatggtggcttacgcctataatcccagtactttgggaggctgaggcaggcggatcacttgagctcaggtgttcaagaccagactgggcaacatggcgagacactgtctctactaaaaatacaaaaaaaaaaaaaaaaaaagccagacatggtggtaagcacctgtggtcccagctactagggaggctgaggtgggagaattgcttaaccctggggagtggaggttgcagtgagctgagattgcaccactgcactccagcctgggtgacagagcaagaccctgtctcaaaaaaagaaaaaaagaagaagaaaagaagtcccactcctggatatttacccccaaaagaaaaatatgtaattccataaagacttgtacaaagatgttcatagcagctttattcatagtaatctcaaaacttaaatgacccaaatgtctgtcaacaggacaatgggtaaatacattcatagtctgttcatccaatggaatattactcagcagtaaaaaggaatgttatagttgcatgcagcaatgtgtatgaagctcataaacctcatgctgagtaaatgaagccagacgcaaatgagtttacactgttttactccatttacatgagattttagaaaatacaaactaatctatagtaacagaaattagatctgtggttgcctggtgtcaaagcttgagaggcactcactgcgaagaagtgtgaagggatgtcttttggttgtgaaaatgttctatatcttgagtgtggtggaggttacatgggtggatacatttgtcaacattcatcaaacagtacacttaaaatgggtgaatttgttataagtaaattatgctccaataaatttgatttatttgttgaaaaacttggtgtaagggggaagtgcctaaccaatagaagacactcaaaaaatgtgttgaaggaaaaaaatcctgtgaaataaagcaggtaagagaaaataagaactcaatatcatccaaaatatagattacaaatcctaaatgagataataggaaattaatcccagtgctctgtttaaaggctcatacctgtaatcccaacactttgggagactgaggcaggaggatgggttgagcccaggagttcaagaccagcctggtcaacatagggagagcctgtctcttcaaaacaaaaatttaaaaattacctgggtgtagtggcacgtgcctgtgctcccagctactccagaggctgaggcaggaggatagcttgagcccaggagttcaagcctgccctgagccataatcactgcaccacactccagcctgggcaacagaacaagacccttcctcaaaaaagcaataaaataaaataaagaaatgcacatgactaacatagggtttattccaggaatgcaggaatagcccagtagcagagaaagcctattaaataatttatcacattaatatatcaaaagatcaaaccatttgatgcta

SEQ ID NO: 234 - DNA, 2002 bp, Homo sapiens
tttactccatttacatgagattttagaaaatacaaactaatctatagtaacagaaattagatctgtggttgcctggtgtcaaagcttgagaggcactcactgcgaagaagtgtgaagggatgtcttttggttgtgaaaatgttctatatcttgagtgtggtggaggttacatgggtggatacatttgtcaacattcatcaaacagtacacttaaaatgggtgaatttgttataagtaaattatgctccaataaatttgatttatttgttgaaaaacttggtgtaagggggaagtgcctaaccaatagaagacactcaaaaaatgtgttgaaggaaaaaaatcctgtgaaataaagcaggtaagagaaaataagaactcaatatcatccaaaatatagattacaaatcctaaatgagataataggaaattaatcccagtgctctgtttaaaggctcatacctgtaatcccaacactttgggagactgaggcaggaggatgggttgagcccaggagttcaagaccagcctggtcaacatagggagagcctgtctcttcaaaacaaaaatttaaaaattacctgggtgtagtggcacgtgcctgtgctcccagctactccagaggctgaggcaggaggatagcttgagcccaggagttcaagcctgccctgagccataatcactgcaccacactccagcctgggcaacagaacaagacccttcctcaaaaaagcaataaaataaaataaagaaatgcacatgactaacatagggtttattccaggaatgcaggaatagcccagtagcagagaaagcctattaaataatttatcacattaatatatcaaaagatcaaaccatttgatgctaaaatcacatttgatataatttaccatttattcataataattttcaggattcaattaattaggaataaaatacttcttcagcataatagaaaataccccagcctggtacacagcttcatactttatggtaacacagcggagattctcactgaagaaaagatgaggcaagaaaagatgatgaagaaaagatgaggcaagaaaagatgatgtctgcacactgtcagacatcaccactgtttaacatttcctgaaagctcttcaaacacagtgaaacagaaaaggaaatgcgatctaaataggaaaaattacaacattccttgttaatgacatgattttctatctgagaaaaaagacagcaagaaaatcaacttaaaacaactagaacttttaaaaagctggcaaagtgactggtaataaaatacatatgcaaaaagaaattgtgtagccaatatatcagttgtgactagctagaaaattgtaatacaaatattctcattgtgatcacaataaaatttaaagcacatgggcatttttaaatatccataatttagatgaagagaaagaaaattttgataagtagagaaacataccatcttctgaaaggatgtatattataaagatagcaatattataatgacagcaattcttctctaattaaatttattttattttgaatcaaaatggaagtgttatttgggaaggaaatttggcacaattgttataaagttacattggaagattaatcagatgaaaatagcaaagataattttcaaaaagaagaaaaatggtgggatttgttctaccagatactgaaatatattataaagctgaaactattaaaatattataatatcagagaaggaacaggtagatcaatggaacaaaatagaaatcccaggtacaaataccatcttggttcataataaagggagcatattgaatagagaggtaatgaatcattaaatgattcttggaaaactggttaactattttggcaataagtaagtaaatattcttactcggtaccataaacacaaaatcactatagatatgtacagttgctttttaactaaaaaagaactaaaaatcatatgtgaatatctgatcaaagaatggaaaaagcataaaatcaaagt

SEQ ID NO: 235 - DNA, 1002 bp, Homo sapiens
gcctgtagtcccagctacttgagaggctgaggcgggaggatcacttgaacccgggaggtcgaggctgcagtgacggggattgtgccactgcactccagcctgggtgacagagcaagaacctgtctcaaaaaaaaaaaaaaagaaaaaagaaaaaaagaatgagaaactcatacagattagaagagactaaggagacacaacaaataaatgcaatgtagaatcattgaagggaaaaaaatattagttgaaaagctgagatcccgccactgcactccagcctgggccacagagcgagactccgtctcaaaaaaaaaaaaaaaaaaaaaaaaaaaaaagaaaagctgataaaatttgaataagccctgtagtttagttaataatagtgaagccatgttaatttcctgggtttggtcattgtgctctggttatgcaagttgttaacattagaggagactgagtgaaaggtatgcatgaactctctgtactaattttgtaaatttctctgtaagtctaaaattattcataatatgcaaaaattaaacaaaaaataaaataaaataagcacatggaatgagactgtcccctgggtctctgtagaaaccaggtcaaacatcccaaatgctcttttacccccattctgagttgggccagaatggtcagaataatggttcccaatgtaccttgataaacacggaaactctcaggaccgagtcctaaggttctctgattcaataggtttggagtggacttgagaactgatctttttaataagggcctcagtctgtggaactattggcctcatgtgccctgtggataatcttggctgttggttcatttttcttaactgaaaacagtggcagaaactatggggatttttaaatctctaggctagaacattaactttttaaaaattcagaatagtattttatttgcctcaagcctgtgaatggggatcccacaaatcaccccccactgaagacaatgcccataacaaggtaacct

SEQ ID NO: 236 - DNA, 2002 bp, Homo sapiens
ttatgcaagttgttaacattagaggagactgagtgaaaggtatgcatgaactctctgtactaattttgtaaattttctgtaagtctaaaattattcataatatgcaaaaattaaacaaaaaataaaataaaataagcacatggaatgagactgtcccctgggtctctgtagaaaccaggtcaaacatcccaaatgctcttttacccccattctgagttgggccagaatggtcagaataatggttcccaatgtaccttgataaacacggaaactctcaggaccgagtcctaaggttctctgattcaataggtttggagtggacttgagaactgatctttttaataagggcctcagtctgtggaactattggcctcatgtgccctgtggataatcttggctgttggttcatttttcttaactgaaaacagtggcagaaactatggggatttttaaatctctaggctagaacattaactttttaaaaattcagaatagtattttatttgcctcaagcctgtgaatggggatcccacaaatcaccccccactgaagacaatgcccataacaaggtaacctacccatgagcttctgagggatttaggaattgtctaccatctcctctctaagaagggctcccacaatatatccccttctgcttgcttctaactccctatcacctgctaaagaaggacctcaccttttaatcactttcattgccaaggggcacaaggagccccaaactctgtcacctaggaagagcttgacctcatggtttccacactgtgtgcttttatgtccctgctccaggagatgatggacattgtcaaagccatctatgacatgatggggaaatacacatatcctgtgctcaaagaggacactccaaggcagcatgtggacgtcttcttccaggtaagtgcacacaccctgcacatgagctgtaagcccagcctagatcaagtcaacccacgagcatctgagcaaatgatttgtgtccaacctctgtactaagcatggttggtaacagaaaagaattataagatacattgtcctcaagaaacagatgatctccttaagctgcaagtgtacatgacagaagagaacaagaaagtatattattaaacgctagtggtatagtatgaactctaaatccataaaaatttggggatcagggtaaacacgaaagacttcattaattacaactgtggaggtgttaagcatttgtgtctgggaagtaaggggaaataagattggaaactaggatagggccagattatgagacctttaaatggaagagtttggccttgctctggtacaggatgggcagctagtgctgatccttgactaagggagtggtataatcattggggcattttaggaaaaaattaatctagcggtggagtatcagagaatatcaagagttcactctagttcaacctcccactttgcagatgggaaaagagagtcctctctggccttgtgcaagtttgtacagcaagtaacaggccagaatcagaacctcttttgcccagtgttctgccagatggacagggtagcagggagtctacagaagaagcagaataagccagcagtgaggtgatgagtgtccagagcaagtcttttgatttaaggaagctcatggggctcaaagtgttgtaatcaggacctaattggagttgtctggccagtgaaagacaactctcattctcagggcaaagttggttaatgaaatgaatgaaatgagctccagctcgttactctgagctccagcaagaaagcaggggagtaagctttggaatggagatcaccagattctgtaaagtgctttctgttatgtctttcagaaaatggacaaaaataaagatggcatcgtaactttagatgaatttcttgaatcatgtcaggaggtaaggagagatctcagggcacaataactctacatctgggaaaggaaacctggggcctggggacctgcagaaggaaggtgatgagaaacctgcac

SEQ ID NO: 237 - DNA, 1002 bp, Homo sapiens
tctaactccctatcacctgctaaagaaggacctcaccttttaatcactttcattgccaaggggcacaaggagccccaaactctgtcacctaggaagagcttgacctcatggtttccacactgtgtgcttttatgtccctgctccaggagatgatggacattgtcaaagccatctatgacatgatggggaaatacacatatcctgtgctcaaagaggacactccaaggcagcatgtggacgtcttcttccaggtaagtgcacacaccctgcacatgagctgtaagcccagcctagatcaagtcaacccacgagcatctgagcaaatgatttgtgtccaaccctgtactaagcatggttggtaacagaaaagaattataagatacattgtcctcaagaaacagatgatctccttaagctgcaagtgtacatgacagaagagaacaagaaagtatattattaaacgctagtggtatagtatgaactctaaatccataaaaattctggggatcagggtaaacacgaaagacttcattaattacaactgtggaggtgttaagcatttgtgtctgggaagtaaggggaaataagattggaaactaggatagggccagattatgagacctttaaatggaagagtttggccttgctctggtacaggatgggcagctagtgctgatccttgactaagggagtggtataatcattggggcattttaggaaaaaattaatctagcggtggagtatcagagaatatcaagagttcactctagttcaacctcccactttgcagatgggaaaagagagtcctctctggccttgtgcaagtttgtacagcaagtaacaggccagaatcagaacctcttttgcccagtgttctgccagatggacagggtagcagggagtctacagaagaagcagaataagccagcagtgaggtgatgagtgtccagagcaagtcttttgatttaaggaagctcatggggctcaaagtgttgtaatcag

SEQ ID NO: 238 - DNA, 2002 bp, Homo sapiens
ggaagagcttgacctcatggtttccacactgtgtgcttttatgtccctgctccaggagatgatggacattgtcaaagccatctatgacatgatggggaaatacacatatcctgtgctcaaagaggacactccaaggcagcatgtggacgtcttcttccaggtaagtgcacacaccctgcacatgagctgtaagcccagcctagatcaagtcaacccacgagcatctgagcaaatgatttgtgtccaaccctgtactaagcatggttggtaacagaaaagaattataagatacattgtcctcaagaaacagatgatctccttaagctgcaagtgtacatgacagaagagaacaagaaagtatattattaaacgctagtggtatagtatgaactctaaatccataaaaatttggggatcagggtaaacacgaaagacttcattaattacaactgtggaggtgttaagcatttgtgtctgggaagtaaggggaaataagattggaaactaggatagggccagattatgagacctttaaatggaagagtttggccttgctctggtacaggatgggcagctagtgctgatccttgactaagggagtggtataatcattggggcattttaggaaaaaattaatctagcggtggagtatcagagaatatcaagagttcactctagttcaacctcccactttgcagatgggaaaagagagtcctctctggccttgtgcaagtttgtacagcaagtaacaggccagaatcagaacctcttttgcccagtgttctgccagatggacagggtagcagggagtctacagaagaagcagaataagccagcagtgaggtgatgagtgtccagagcaagtcttttgatttaaggaagctcatggggctcaaagtgttgtaatcaggacctaattggagttgtctggccagtgaaagacaactctcattctcagggcaaagttggttaatgaaatgaatgaaatgagctccagctcagttactctgagctccagcaagaaagcaggggagtaagctttggaatggagatcaccagattctgtaaagtgctttctgttatgtctttcagaaaatggacaaaaataaagatggcatcgtaactttagatgaatttcttgaatcatgtcaggaggtaaggagagatctcagggcacaataactctacatctgggaaaggaaacctggggcctggggacctgcagaaggaaggtgatgagaaacctgcacatacctgcaacccctcccatcagagccaacaacaccagcaacaactgtgaagtccacagttccactcctcaacctgacctgcagttggtcttggctaagcacaagactgaacagagagcctaagtaggggtctgggggcatgtgaaaactcagagggggtctctgtgaaaatagacttcccgagagggcaacaccattattttttagcctgcctctggcttgatgacccatttcccagactacaaggaagcagctggggggaaaaaaacctacaattgtgtgattctcaaaccacagtgtgcataaaaattgcctggaatgattctgaaaatgcatatttccaggcctcaatcccagagactctagatctgggtcactttaacacaaatgtcctggaccaatgcttctaacactttaatgtgtgaaacaatatccttgatgattttgttaaaatgcagattctaattccataggtctggggtagggcctgagatgttacttttctcacattctccccagtcacactggtgatgctgatcctgggaacacaactttcattaagtctaaccaatagaccagccccagagtccaccagagactgaactggaaataattgcttcatctacttttgagaaatccatttgtacccccacattattttagaaatgttcagagttactctgagctccagccaagaagaatagcaaatgtaagaaagccggggagaagttcctagcagatactgagccccc

SEQ ID NO: 239 - DNA, 1002 bp, Homo sapiens; identical to SEQ ID NO: 137

SEQ ID NO: 240 - DNA, 1002 bp, Homo sapiens
actttgaactgatcactttctaggtccccacccttacttcttgtttttcatacccttgtagagttttctccatataggaaacccatgcttgacatttgctcaccagagttacagagctctcagggaggagactcagagttctaaccctcttgccctccttttttcccaggacgacaacatcatgaggtctctccagctgtttcaaaatgtcatgtaactggtgacactcagccattcagctctcagagacattgtactaaacaaccaccttaacaccctgatctgcccttgttctgattttacacaccaactcttgggacagaaacaccttttacactttggaagaattctctgctgaagactttctatggaacccagcatcatgtggctcagtctctgattgccaactcttcctctttcttcttcttgagagagacaagatgaaatttgagtttgttttggaagcatgctcatctcctcacactgctgccctatggaaggttccctctgcttaagcttaaacagtagtgcacaaaatatgctgcttacgtgcccccagcccactgcctccaagtcaggcagaccttggtgaatctggaagcaagaggacctgagccagatgcacaccatctctgatggcctcccaaaccaatgtgcctgtttctcttcctttggtgggaagaatgagagttatccagaacaattaggatctgtcatgaccagattgggagagccagcacctaacatatgtgggataggactgaattattaagcatgatattgtctgatgacccaaactgcccatgtcatttgtttccagaaacgaggaccaataattctctcacactggcatttgtgctggtagtacaagtcctttaatatgtccaggaagggagccattgcccagtggtccatatctccaccacatcccctgcttgagcccagcgctgcatgtccctcccaagaagtccagaatgcctgcaaattgctgtaattttatac

SEQ ID NO: 241 - DNA, 1002 bp, Homo sapiens
ctgatctgcccttgttctgattttacacaccaactcttgggacagaaacaccttttacactttggaagaattctctgctgaagactttctatggaacccagcatcatgtggctcagtctctgattgccaactcttcctctttcttcttcttgagagagacaagatgaaatttgagtttgttttggaagcatgctcatctcctcacactgctgccctatggaaggtccctctgcttaagcttaaacagtagtgcacaaaatatgctgcttacgtgcccccagcccactgcctccaagtcaggcagaccttggtgaatctggaagcaagaggacctgagccagatgcacaccatctctgatggcctcccaaaccaatgtgcctgtttctcttcctttggtgggaagaatgagagttatccagaacaattaggatctgtcatgaccagattgggagagccagcacctaacatatgtgggataggactgaattattaagcatgactattgtctgatgacccaaactgcccatgtcatttgtttccagaaacgaggaccaataattctctcacactggcatttgtgctggtagtacaagtcctttaatatgtccaggaagggagccattgcccagtggtccatatctccaccacatcccctgcttgagcccagcgctgcatgtccctcccaagaagtccagaatgcctgcaaattgctgtaattttataccatgttctaaccaataaacagaactatttcttacactctcaatcacttcttcatgactccgttaggtaagagaggtaagctgtgaaaagggaaggctagtccattcatttgacacccaattattagtgcagttgtccctccatatgtgtgaaggatcagtcccaggactctccataccaaaatctgcagatactcaagtcccacagctagccctgagggactcgtgttttcagaaaatttggcctccatatatgcaggtttcacatcctataaatac

SEQ ID NO: 242 - DNA, 200 bp, Homo sapiens
cccaagctcaaccattccaatgccatctcctctggttccagataagattgaagatgagctggagatgaccatggtttgccatcggcccgagggactggagcagctcgaggcccagaccaacttcaccaagagggagctgcaggtcctttatcgaggcttcaaaaatgtaagacccgtgcacgctctgaaggcctgggggg

SEQ ID NO: 243 - DNA, 200 bp, Homo sapiens
ttgtctaccatctcctctctaagaagggctcccacaatatatccccttctgcttgcttctaactccctatcacctgctaaagaaggacctcaccttttaatcactttcattgccaaggggcacaaggagccccaaactctgtcacctaggaagagcttgacctcatggtttccacactgtgtgcttttatgtccctgctc

SEQ ID NO: 244 - DNA, 200 bp, Homo sapiens
accctcaatacagactgttcctacagtccacgtcctcagccactagaccatacggccactgggatgatagacagaccactgcagccatggataaggcaaaaacagggctggctgtgttgatctgtgtctctcagagctccattcttcctcaagggggcaccttgcaaaaaaaaacaaaaaaatggggcagggtagggaac

SEQ ID NO: 245 - DNA, 200 bp, Homo sapiens
gccactgggatgatagacagaccactgcagccatggataaggcaaaaacagggctggctgtgttgatctgtgtctctcagagctccattcttcctcaagggggcaccttgcaaaaaaaaacaaaaaaatggggcagggtagggaactgaaggcaggagctcttcacagagcatagccacatcctccaggcagacaagagg

SEQ ID NO: 246 - DNA, 403 bp, Homo sapiens
ggcaaaaacagggctggctgtgttgatctgtgtctctcagagctccattcttcctcaagggggcaccttgcaaaaaaaaacaaaaaaatggggcagggtagggaactgaaggcaggagctcttcacagagcatagccacatcctccaggcagacaagaggacgcaggaggcaccattctgtgagagtatcacagtctgacctcaaagacacagcttcacactgtctgatggcttgatggttaatgtcactctgccttttccccttctcaggactttgtaaccgctctgtcgattttattgagaggaactgtccacgagaaactaaggtggacatttaatttgtatgacatcaacaaggacggatacataaacaaagaggtaagtgagctggggccaggggtgt

SEQ ID NO: 247 - DNA, 403 bp, Homo sapiens
gacaagaggacgcaggaggcaccattctgtgagagtatcacagtctgacccaaagacacagcttcacactgtctgatggcttgatggttaatgtcactctgccttttccccttctcaggactttgtaaccgctctgtcgattttattgagaggaactgtccacgagaaactaaggtggacatttaatttgtatgacatcaaccaaggacggatacataaacaaagaggtaagtgagctggggccaggggtgtgagagggctccagtgaaggtaactaacccaacagaaaacagccccaggcatgaggatagcactgtctgaatgaggcaggctctgctttggggctaacagagctggtccctggcaaaataaagaaggcctccctcattgccctaccctgccc

SEQ ID NO: 248 - DNA, 1781 bp, Homo sapiens
ccaccagggtcccttccaactcacggagcctatggtactgaatggcagccaggttttttatggagcaatagctggacttcacatttgcataatgccttgcagtttcactgttaagagtactgcattgtattctaattatatgaatctcggtcattcctttatgacatttctgaggaatactatctcaatcaagaaaagccctaattgcactcctctcctatcccggtgagagagcacagactcgtgcctgctccgcaggggtggaggctggaattcagtagtctgagtcggggatgcctggagcaggaggtggtcaggggcattgtcctttccaagtcaggaaggcagacagcacctgctgttggtgccaaggttactggacaggctgcgagggctctgtctgtctgtccgatgttcacaggccagctccccggaggctcagcactcagcccagcttctccgagatgcaaaccaggccactctgaggctgcctacaaactttctgctgagtgccgacagctgcttcctgctctgcggggagttcttccagatcctgatcaaggcacagagaattgatctatcagattaaccaggaaggaaagagtgggagagcgagtgtgggaggctgtggggctgagtgttttctgcgtagcagtcccctcccttctgacttgagtattaattgctacattaccgctgccatgtaagaaagacagtcagcaaagcctgggagagctccagctcctccctccctgctctgctcaacttcactctcctcctcggttcccttggagtaccttgtgccccggcagtgctgtcccggccctggcatcctgaggtcctcccgtggtgaggacttaagtggacacgcaggagtgggtggagagagggagggagagtttgccctgcaggctctctggatgcagaagccagactcgctgcagaggcagctgtgctgttcccggagcctggcttcaggggtgcatccgtcactcagggttcattcacccaggcaggctccaagttcctggggtgcacaaggtgggcactgtcccttctgggtgctgacagcagagcctggctcccctccgccaccatgagcggctgctccaaaagatgcaagcttgggttcgtgaaatttgcccagaccatctttaagctcatcactgggaccctcagcaaaggtatggaaactggccttgacccttgctttctgtcttgatatggcctggctggtcgcattgcctcggtgtggtgagcgtgaccattctggtgcacccaggtcttggaaaaagctggggaaattggtggctgggattcgaggttgctgacaacctgcgtcctggctttgagtaggcgggcacccagccagggaactcagctggctgtaattgcctggaactttggaaatggagttggtggtgtgtggctgatacgttatgggcgggcagagggatagaaccctttccagagcattggaagtggcttagcgtgactggagtttcaagaagttatccatggaaggttgtattttgttgataaaagagagatttgatgcagtgggttgtgagtaattctgcagaacagagacgcttgagggggccagtgggaggtggtgatgggccggcatctgctttgccctggtggcttcagaaaccggatcagctctgcacctcaagtgccaagagcctcctctcatagggttccagcgtctcgtgcttctggggcttcattcatcgttctgctttcttggatccctgtccctccacatttcatgccta

SEQ ID NO: 249 - DNA, 833 bp, Homo sapiens
caaggcacagagaattgatctatcagattaaccaggaaggaaagagtgggagagcgagtgtgggaggctgtggggctgagtgttttctgcgtagcagtcccctcccttctgacttgagtattaattgctacattaccgctgccatgtaagaaagacagtcagcaaagcctgggagagctccagctcctccctccctgctctgctcaacttcactctcctcctcggttcccttggagtaccttgtgccccggcagtgctgtcccggccctggcatcctgaggtcctcccgtggtgaggacttaagtggacagcaggagtgggtggagagagggagggagagtttgccctgcaggctctctggatgcagaagccagactcgctgcagaggcagctgtgctgttcccggagcctggctttcaggggtgcatccgtcactcagggttcattcacccaggcaggctccaagttcctggggtgcacaaggtgggcactgtcccttctgggtgctgacagcagagcctggctcccctccgccaccatgagcggctgctccaaaagatgcaagcttgggttcgtgaaatttgcccagaccatctttaagctcatcactgggaccctcagcaaaggtatggaaactggccttgacccttgctttctgtcttgatatggcctggctggtcgcattgcctcggtgtggtgagcgtgaccattctggtgcacccaggtcttggaaaaagctggggaaattggtggctgggattcgaggttgctgacaacctgcgtcctggctttgagtaggcgggcacccagccagggaactcagctggctgtaa

SEQ ID NO: 250 - DNA, 857 bp, Homo sapiens
acagagaattgatctatcagattaaccaggaaggaaagagtgggagagcgagtgtgggaggctgtggggctgagtgttttctgcgtagcagtcccctcccttctgacttgagtattaattgctacattaccgctgccatgtaagaaagacagtcagcaaagcctgggagagctccagctcctccctccctgctctgctcaacttcactctcctcctcggttcccttggagtaccttgtgccccggcagtgctgtcccggccctggcatcctgaggtcctcccgtggtgaggacttaagtggacagcaggagtgggtggagagagggagggagagtttgccctgcaggctctctggatgcagaagccagactcgctgcagaggcagctgtgctgttcccggagcctggcttcaggggtgcatccgtcactacagggttcattcacccaggcaggctccaagttcctggggtgcacaaggtgggcactgtcccttctgggtgctgacagcagagcctggctcccctccgccaccatgagcggctgctccaaaagatgcaagcttgggttcgtgaaatttgcccagaccatctttaagctcatcactgggaccctcagcaaaggtatggaaactggccttgacccttgctttctgtcttgatatggcctggctggtcgcattgcctcggtgtggtgagcgtgaccattctggtgcacccaggtcttggaaaaagctggggaaattggtggctgggattcgaggttgctgacaacctgcgtcctggctttgagtaggcgggcacccagccagggaactcagctggctgtaattgcctggaactttggaaatggagttggtg

SEQ ID NO: 251 - DNA, 890 bp, Homo sapiens
tggcccaccttcagggtcatgaggattcataaaccctattctgcgaagtgcctccaggaatcatcaagggagctagggcagctctgagtctccaccaggcccaccctccgcctctcagggctgagcttcacttcccttcccaaaggggccagggagaggggctgctgatgacatgatctcagaggaaggccaaggcctccaggctgcctctgggcctggcacaggaaggaggaggagaaaatagggagcccaaggaaagatcaacccagcccagcccaaggacccccagccccagccccagccccagctgggctcaaactaattgaaaacagactggaaaaggctgcttttgcccttcctctagactcagcatcatcaagactggagggacagagcatttgaatcatcagacgctgggccagactgtcaccccacgcgttttctcattttatcgtcctaagaagcccagaaggtgcgtaaaatggcctgtcccaaacagatgaggacattacctttctcctcttcctcctcctccttcttcttcttcttctttttgcttcatttttctttcattttttcccccagatgttgcatttcagagaggctgagcgtgttgactaaggtcacacagctacaaacatcagggacctgcgaaaaagctctgttccctggtgacaggtgttctgtgatcctaacacagccggaggtggggacaacgtccttgcagtaacaaaggccctgttgctcaactcagtggacatcaggccctgttttcattcattagcaggtcagggattccagtgtcacctgtgccatgtattccagctgatctacctgcaagcctctactccccattttcccagcagcagccgcagacaccacccaactgg

SEQ ID NO: 252 - DNA, 943 bp, Homo sapiens
gggtcatgaggattcataaaccctattctgcgaagtgcctccaggaatcatcaagggagctagggcagctctgagtctccaccaggcccaccctccgcctctcagggctgagcttcacttcccttcccaaaggggccagggagaggggctgctgatgacatgatctcagaggaaggccaaggcctccaggctgcctctgggcctggcacaggaaggaggaggagaaaatagggagcccaaggaaagatcaacccagcccagcccaaggacccccagccccagccccagccccagctgggctcaaactaattgaaaacagactggaaaaggctgcttttgcccttcctctagactcagcatcatcaagactggagggacagagcatttgaatcatcagacgctgggccagacgtcaccccacgcgttttctcattttatcgtcctaagaagcccagaaggtgcgtaaaatggcctgtacccaaacagatgaggacattacctttctcctcttcctcctcctccttcttcttcttcttctttttgcttcatttttctttcattttttcccccagatgttgcatttcagagaggctgagcgtgttgactaaggtcacacagctacaaacatcagggacctgcgaaaaagctctgttccctggtgacaggtgttctgtgatcctaacacagccggaggtggggacaacgtccttgcagtaacaaaggccctgttgctcaactcagtggacatcaggccctgttttcattcattagcaggtcagggattccagtgtcacctgtgccatgtattccagctgatctacctgcaagcctctactccccattttcccagcagcagccgcagacaccacccaactggcagaaatttcaaacaaggggttctgccttgcactccggtgcaagggttgggcacgtggactcacat

SEQ ID NO: 253 - DNA, 841 bp, Homo sapiens
cacaaaacaaatccgggactttaagcctgatctgcttgacctgaaactcatatctacttccctgccctctgaagatctatatgtcctatgtcatcacttcactgttcacacaaggtgatacctggcttctccaagcacctgctaccctgaacttactgcaccactctttccttcctagcctgaatgcaatttgcaatgaggagatgatttgattttcttcagccctagacctccagcttcctgagagcaggtactcttgcctcttcttgctcattattgatccatatatttagaatagcgcctggcaggtagatggtgcttaataaatattcattgaataaatgaatgaatgaatgatccaatgagccccaaagcaaataacaataaaggacatttgcagagtgctctacagagagacaagtgctttccctttagctttatcttaccccattctcacaacaatcccctgacatgattgggttcatgtttcacagatgaggaggctaacggccaggtgtacataccaggggacatgggactgggttcatatgagctcaggggtaaatgatgacaccctttcccctgccctgaaggatctcagtttgagtatttgtagcacacttaggatgttctgggccaggctgagtggcggtggatgggggcggtggaggtggggtatgcaaagcaggaaactcggcctttgctttctaaaagctcccagtctatttgaggccagacttatgcatgcagaacatttgggaaatggtacaagacagcagcaagcatagtgctgaattgcacataatcaggtgccaactgcattcccttccttaactaatct

SEQ ID NO: 254 - DNA, 895 bp, Homo sapiens
aactttctcctcagcaaagagctctcctctgttccctgaatcctggatatcccactgggtcctctagtgaccccaagcttcagcctcgcatgccctcttctcgaacagagaaggcaggagggaagcagggaccagcccctgctccatcttccaggattccaggcctccctggcctggacaagccctgagctggcagttaggagagcagaggttgtgaatctggtgggacccccagcaggtctttctggctcagtgccctcatctgtgagcaggggttccccaggagaccacgacagaggcctggaacccaagttctaatcccacatcctggctgggcaacttcaggcaaatttctaacacaaggtaagcctcaatttctctctggggtaatgatcaggcacctgcttaattcacaggggtttggtgggcatcactgtggacaatgtggttgcacagcagtgggcaatgcaaaggaaaggaagtatgttagtaagtgcccctcccctgttgcacaaaacaggacacatgctgggattgcagaaaagcaataaatgctgcacaggtgaagaaaactattcaaggaccctggccaagtcacaggctacctgtggccctgaggggacagctcatgggttggcattaggggaagcagctctcaaggggcctgtatcctggggattcaactctgtgcctatgtggcattgagcctgtgtgaatgtggtgactgtcatgctgttttgctgtgtgtgcgtctgcatgcctgtgtgtttgtgtgtctctccaccttcgtggggggcaactgtaggtgtattatgagccttgggtctgtctgtgtgtacaatagcaatgtctgtgcggacttaaggacctgcgcccatatgtttgtgggactttc

SEQ ID NO: 255 - DNA, 890 bp, Homo sapiens
cagagaaggcaggagggaagcagggaccagcccctgctccatcttccaggattccaggcctccctggcctggacaagccctgagctggcagttaggagagcagaggttgtgaatctggtgggacccccagcaggtctttctggctcagtgccctcatctgtgagcaggggttccccaggagaccacgacagaggcctggaacccaagttctaatcccacatcctggctgggcaacttcaggcaaatttctaacacaaggtaagcctcaatttctctctggggtaatgatcaggcacctgcttaattcacaggggtttggtgggcatcacgtggacaatgtggttgcacagcagtgggcaatgcaaaggaaaggaagtatgttagtaagtgcccctcccctgttgcacaaaacaggacacatgctgggattgcagaaaagcaataaatgctgcactaggtgaagaaaactattcaaggaccctggccaagtcacaggctacctgtggccctgaggggacagctcatgggttggcattaggggaagcagctctcaaggggcctgtatcctggggattcaactctgtgcctatgtggcattgagcctgtgtgaatgtggtgactgtcatgctgttttgctgtgtgtgcgtctgcatgcctgtgtgtttgtgtgtctctccaccttcgtggggggcaactgtaggtgtattatgagccttgggtctgtctgtgtgtacaatagcaatgtctgtgcggacttaaggacctgcgcccatatgtttgtgggactttctgggcatgcatgcttgtttatgaggccatacatccgggtattctgtgaactgctagcatggtgtgtatctgtgtggcagacagaaaatggctgggtggga

SEQ ID NO: 256 - DNA, 1002 bp, Homo sapiens
atctcagcactttgggaggccaaggcgggtggatcacctgaggtcaggagttcaagcccagccagcccaacatggcgaaaccccgtctctattaaaaaatacaaaaaaatttagctgggcctagtggtgggcgcctgtaatcccagctactccggaggctgaggcaggagaatcgcttgaatctgggaggcagaggttgcagtgagcagagatcgcaccactgcactccagcctgggcaacagagcgagactccgtctcaaaaaaaaaaaaaaaagaaaaagaaaaatgagagtgtaagggcccagaggggctgagggctcctttctcctccccaactccctgtcactagaaggtgggccctgccataggaggattctgcagaaccctcaaggacccgcggagcaggacggcaccttcttcccatgaccacccatttggatgtgtttttcacccctttctgggtggggcagactttccccctccccatgagttcaggcaggtgggttaaataagatttcccttgaagtcgaatgaaatcacaatgcaccacacacagggacacacacacacacacacgcacgcacgcacatcacacacacacacacacacacacacacacacacacacacatacacacacacagtctccctggggccaatctactgccccctgaacctcacccatcagccaggtgcctggccccgggtctgtctcttagggttacatgctcccggggctcccgcacataccccggcagatgagggtgcgcaggggtgagggcgcagggctgggcgtcccccgcccccaccgtgcagccctcgcccccgccccgcccctccgtagttgcccgcccgccgccccctccgccgccccctccgccgctccgactctcgccccgagcgctggcagcaggcagcaggcagcaggcgggcgcgctgtggctccgcgccgcgcggtccgggctctgttcattcatgattggtactcggccctccgagacc

SEQ ID NO: 257 - DNA, 821 bp, Homo sapiens
agcactcctggggctcattgttaagtttataaaactcagagctgatgagttgtgtgcactgtgtgggtctgagtgggcttatgactcccctccaagcctggctgtaagaatctaagacttaaagctgaaggaccaaatgggactttctgtcccatcccctctctgctccatgcaagcaccaactgtggatttttgcccctaattatattagggaacgctgtcaatcaaaaagatgatgttaaactcatccagaacaaaccaaaccatgtttaaggggaagaaaagattacatcttcaaatgccagcatgccatcattaatacaatgtctaatgtagtcaatatagttcaggcaacattgaaaatgaaccactgcaaatactaggaatacaatttcaagaggaagcacaacattctgtgtttctatgcacacagtcctgtaaattatttgcagctcaagtatgtcatgttcttttaaattttcccctgggtacagcttgaacaacttcctacaagtgttgatatgtcatattctcattatcatttagttcaaaattaccatgatttaattaccatgaggttgcttttttgatacatgagttacttagaaattgaattaggctaggcatggtggcttccacctataatcctagcactttggaaggccaaggcaggaggattgcttgagtttgaggccagtctaggcaatatagtgagacctcatctccccaaaagtacaaaaaaactagccaggcatggggacacatgcctatagttccagctactcaaaggctgaggtggggaggattgctttgagcctggg

SEQ ID NO: 258 - DNA, 573 bp, Homo sapiens
gccagctatccccagagacatcacaggagaaggagcagaagctggaacatcatccgggagctggactagaacgtcccgggaaacttcagcctggcttctgctttgtcccgaaaacccaggggctccagctccagggctgtgtcttagaatgaggcagtttatctgttcagggcttctcttagtttttaatcccaataggacacactgttgtattaaaaagccatgcgagatggaagaaggaaattgaatgaaatttgagggcaggtaggagcagagacaataaataattcagcagtgaaggaagcagaaaaaagattgcactcatttcgcccttcaacaattatactaaacacctgctctgggccacagaagggccagatcccattcctgtgctcaggaagcccacaggccggcagggagaggctggttggaatgtgtgctttgcactgtaacggaggcatcgagcatggtaagggactggcggtgactgctgcctgcggacgtcgagacaggggcctttgaagaggcaggacctgtctggagtcttacctgggccttggcctggcaatgggg

SEQ ID NO: 259 - DNA, 402 bp, Homo sapiens
gcagcaggcagcaggcagcaggcgggcgcgctgtggctccgcgccgcgcggtccgggctctgttcattcatgattggtactcggccctccgagacccagcccgagcgcagggaggggagccgagtgtgcggcaggaggggcgggcggacggcggctcccgcaccgcacgcggcgctggctcggcagcctcggccgggcggcgcgctctggccccgtgtccagtgccaggcaggcttcagggcaccgtcctcggccctgggcgagggaaccgccgggccgggtcctcgcgcggggaagcggttccgaaggctcgcggggagcggctagccctgagtccctgcatgtgcggggctgaagaaggaagccagaagcctcctagcctcgcctccacgcttgctgaat

SEQ ID NO: 260 - DNA, 402 bp, Homo sapiens
gtccggactctcctctccacgaggagcccggacaggtgcttgtatccaaaggagagagaaatcggcgggagggctggtgtgaacacccagaggagggagccggagtggacgtctgccccagcggcaactggacccctctggggcaccaggtgtcgggactctcctcctggggaaatctctgagagccgaaggaagcggcaatgttcacaggtgggggtgaccggattctctggtggaagtgtggtgaagctcttcccattcccatgacagctggcgtttgagcactcagtgagggtgctgccacactcccacactcctcctaggcggctatgccaggtgcagacctgcgagtcccttcatcaggaagagtgctctgtctgcacccccaaaacctctgcaagc

SEQ ID NO: 261 - DNA, 321 bp, Homo sapiens
ggagggagccggagtggacgtctgccccagcggcaactggacccctctggggcaccaggtgtcgggactctcctcctggggaaatctctgagagccgaaggaagcggcatgttcacaggtgggggtgaccggattctctggtggaagtgtggtgaagctcttcccattcccatgacagctggcgtttgagcactcagtgacgggtgctgccacactcccacactcctcctaggcggctatgccaggtgcagacctgcgagtcccttcatcaggaagagtgctctgtctgcacccccaaaacctctgcaagccaaaaggaat

SEQ ID NO: 262 - DNA, 402 bp, Homo sapiens
taccatttagcaggaaagtgctgagaacagtgattctactcccactccctcataatcacaaaggtatgaggaacccacacccagcaccaggcacagttctggtccctcaatcccagaagaagctcaatggagctcaagataaacagaaagagagagatggaaaagaatggaagacagaggagaaggacttactgcctaaaattcagtgggattgttttgacttggtctctggaaaagggccaaggcttagacctctttgtctgcctggaagggccttgctccatgaatgctttgtaaatctgtaagtgaataagtgagcatatgctttaacaaataagtgaaaagatgaatgattgaatgaatgggggaagcagtaaaggagtgaatgaatgaagcaacaaa

SEQ ID NO: 263 - DNA, 402 bp, Homo sapiens
gacagaggagaaggacttactgcctaaaatcagtgggattgttttgacttggtctctggaaaagggccaaggcttagacctctttgtctgcctggaagggccttgctccatgaatgctttgtaaatctgtaagtgaataagtgagcatatgctttaacaaataagtgaaaagatgaatgattgaatgaatgggggaagcaagtaaaggagtgaatgaatgaagcaacaaatgaattatcaactgaatgacagaaagaatgatcgaataaatgaccacatgaatgaatgaatatgtccataaatgaatgaatgatgaagtgccagaacagctataattaacagcctatcttttcacaaagagcattgatagtcatctccccaaagttgaaaaatataaattca

SEQ ID NO: 264 - DNA, 402 bp, Homo sapiens
atatgtccataaatgaatgaatgatgaagtgccagaacagctataattaacagcctatcttttcacaaagagcattgatagtcatctccccaaagttgaaaaatataaattcagtcaagaagagtcctggtaattttttggatactggtaggtgtatagtgtctttggagaaggtgaggagatgtctctaagttttcactacttttgctgaaacaaaagcagggactgactcacagtgattccccttgtcttcccttatatttcaggttcgttcacccttgcctgggtgagatcagaatctgtatatttatccactcatttatttgttcacttagccagtcccacaattgtccttcagcattgcttccctgcctaagatccactctggcttcctcatcctcc

SEQ ID NO: 265 - DNA, 402 bp, Homo sapiens
gtccataaatgaatgaatgatgaagtgccagaacagctataattaacagcctatcttttcacaaagagcattgatagtcatctccccaaagttgaaaaatataaattcagtcaagaagagtcctggtaattttttggatactggtaggtgtatagtgtctttggagaaggtgaggagatgtctctaagttttcactctttatgctgaaacaaaagcagggactgactcacagtgattccccttgtcttcccttatatttcaggttcgttcacccttgcctgggtgagatcagaatctgtatatttatccactcatttatttgttcacttagccagtcccacaattgtccttcagcattgcttccctgcctaagatccactctggcttcctcatcctccctct

SEQ ID NO: 266 - DNA, 402 bp, Homo sapiens
gaatgatgaagtgccagaacagctataattaacagcctatcttttcacaaagagcattgatagtcatctccccaaagttgaaaaatataaattcagtcaagaagagtcctggtaattttttggatactggtaggtgtatagtgtctttggagaaggtgaggagatgtctctaagttttcactcttttgctgaaacaaaagcgagggactgactcacagtgattccccttgtcttcccttatatttcaggttcgttcacccttgcctgggtgagatcagaatctgtatatttatccactcatttatttgttcacttagccagtcccacaattgtccttcagcattgcttccctgcctaagatccactctggcttcctcatcctccctcttcctccatctcctc

SEQ ID NO: 267 - DNA, 402 bp, Homo sapiens
atagctgctgctgcttcccttaactacaattctgaacacactatgaggttgtcattatgggtttacacatttatctctctgactagctttcaggcactgagtcttatcccagggcctctgtcaggcctgacactgcatccaggcttgatggatgctggcggcatggaggtaaggatggatgggccagagtgtgcgttcttagatggctctgagcggtgtgagaatgcggcggtgcagatgaggaatccaggtctgctcctggggagaagctctgcaaaattctgcataatggccgtggagctgatgttcccattcatcaggcagggaaggaacagtttttagaaaagagagagagagcctaagagtcctagggccttcagagaaacatctctttaaatgctt

SEQ ID NO: 268 - DNA, 402 bp, Homo sapiens
ggaagctagaagtaggattgcattatggctatgagcaccgcgttaaaataagagtcttgggattgaactccctttcattggttcatagctgagcctttccaggcctcagtttcctcttctataaaatggggacagtgggccaggtatggtggctcacatctgtaatcccagcagtttggaaggtcaaggtggacagatcactgaggtcaggagttcaagaccagcctggccaatatggtgaaaccccatctctactaaaaatacaaaaattagccgggcatggtggcatgctcctgtaatcccagtcactcaggaggctgaggcaggagaatcgcttgaaccgaggagacggaggttgcagtgagccaagactgcaccattgcactccagcctggatgacag

SEQ ID NO: 269 - DNA, 402 bp, Homo sapiens
aggtatggtggctcacatctgtaatcccagcagtttggaaggtcaaggtggacagatcacgaggtcaggagttcaagaccagcctggccaatatggtgaaaccccatctctactaaaaatacaaaaattagccgggcatggtggcatgctcctgtaatcccagtcactcaggaggctgaggcaggagaatcgcttgaaccagaggagacggaggttgcagtgagccaagactgcaccattgcactccagcctggatgacagagcgagactccgtctcaaaaaaaataaaaattaaaaaatggggacaatgacagtgtctccctatagggccacgtgagggccaagaaggaattgaacatggtgctgcacaccaggtgagttggcagtgctggctttgctgct

SEQ ID NO: 270 - DNA, 402 bp, Homo sapiens
ccttactgctcatctcctttctctccttagccacatgttggcccaaatcacctgcgtatgttatacggttgttatgagcatacactcctggttaggcagacctagaattcaaatcctggctctgcaactcattagctgtgtgacattgagcaggttacctcgcttctgtgaactttcatctctacataatctagaaaatgataagtattgttgataattccctcccaggttgttatgaggattaaatgcagtcatgcatgtaagatgcagcggtcagcactcagaatgcgctaaaggtaaattgttactatctgggtctactccacttaaagtgtgctcctccaaccaacagcctcagcatcagttgggagcttgttagaaatacagagtcccggccaggcg

SEQ ID NO: 271 - DNA, 402 bp, Homo sapiens
tggcggatcatgaggtcaggagatagagaccatcccggctaacacggtgaaaccccgtctctactaaaaatacaaaaaaattagccaggcgtggtggcgggcgcgtgtagtcccagctactcgggaggttgaggcaggagaatggcgtgaacccaggaggtggagcttgcagtgagccgagatcgcgccactgcactccaagcctgggcgacagagcgagactccatcttggaaaaaaaaaaaaaacctcaactcagtgagacctacccagtcagaacctgcattttaacaagatcaccagatggtttatatgcccactggagtctgaggaatactggcctaaagtacagattatggaactatgtgtattgtattacacaaaattatatatcaagccagaag

SEQ ID NO: 272 - DNA, 402 bp, Homo sapiens
agctgtacctccaagttttctgctacctgaagaaatgataaggaggcattctaggtctttatctaagttgcttctaagaacatgggccagaacagggtgcaggacagagccatgtggactgcaactagagacttgcctgcataatggatttcactgataatgttcagaatcccagagcaggatggcagcctggtttacatagcagagcctttgtgtgggatttgaagccagaaaatgtgactaaagtaggagtctaaacagacacaggtagggcctggggaatgaaagtcaaatgccttttccagggggtctagtaggacctctctgttggtggggatcccccaaaaaagtaatctttttatttttgtaggagtcctgtaatggtttcattattattctcac

SEQ ID NO: 273 - DNA, 402 bp, Homo sapiens
actagaccctttccagatgaggacactgaagactagagggcataagcaaatgtccaatgtctcacttctcataagtggaaaagccaggattcgaacccagatggtttgcctccagtgcctgcatgctgaatcactggactaggctggacctgagcatttagaggacattatagattatgtaacactgtggggattcagaggtatggagaaagcacctctatctgaggggcaggggctggagaattagagaagatggccgaaagaggcggcattagagctcaacaaaagagctaggggttggcccaggcaagaatgtaggttagtgaagttctaggcagaaggaacaggataagcaaagtcacagaggcaggcaacaagaaggggaaagaaatgaaaactgac

SEQ ID NO: 274 - DNA, 402 bp, Homo sapiens
gcaacaagaaggggaaagaaatgaaaactgacagtgatgttttgtatgcttgtgacttggaggatgttaacagaaagaggatgccatcagaagtgggaggcaaggagcagagtcaggctgtccatgttcaggagaatgggacaaggtcctaggaggtagtagacagcaaggatgaggaaagcaccaagcaagtagggatcagagactgtgccctctcagcaccacccttgtccccctaagtgtctccccgtgatcactgcagcttacatttgattcctccttctcctctcccagggaacttactatttgtccccatgatttagcctttgattaccttgaactgttctatcatcattccctgtaaacacgcttgactctccagcaagagtgacctttcctcag

SEQ ID NO: 275 - DNA, 402 bp, Homo sapiens
aataataatgattttgatagtggtggtgatgatgtttgtgatggtggtgtgatggtggtgatggggatggtgttattcgtggtggtaattattatattatggatgtgtgagtctgttttcacactgctgtaaagaactacctgagactgggtaatttatgaagaaaagaggcttaactgactcacagttctacaggctttaccaggaggcatggctggggaggcctcaggaaacttacaactgtggcagaaggctaaaggggaagcaggcatattttcacatagtggtaggacagagagagagcaaaggggggtgtgctacatacttttaaacaaccagatttcatgagaactccctcactatcacaagaacagcttgggggaaactgcccccatgatctgg

SEQ ID NO: 276 - DNA, 402 bp, Homo sapiens
gatggtggtgtgatggtggtgatggggatggtgttattcgtggtggtaattattatattatggatgtgtgagtctgttttcacactgctgtaaagaactacctgagactgggtaatttatgaagaaaagaggcttaactgactcacagttctacaggctttccaggaggcatggctggggaggcctcaggaaacttacaacttgtggcagaaggctaaaggggaagcaggcatattttcacatagtggtaggacagagagagagcaaaggggggtgtgctacatacttttaaacaaccagatttcatgagaactccctcactatcacaagaacagcttgggggaaactgcccccatgatctggtcacctcccaccttgtccctcccccaacattattaacta

SEQ ID NO: 277 - DNA, 402 bp, Homo sapiens
accactttgccctcagaggtagggtctgttctactgggattctgtgctaactgatcacagggaacagtggggaaaatggcctctcccaccggctgcttctggagagtccaagcctccctcctcagtgaccttgctgtgcggcaggaatgagaggcacatcctggctctggagatgttcttcttggcagcaagtcctccccagatggcaggagggattacagaagtgatttcaggtgccagtgcctccacagcccacccaccctctgctctaggcaagtcagaggcacctgtagagcctctgttctttgtgtgtggaaaaggaataatctcgcaccagcattataaggttctcatggtttttaggggtgtggcatatagtgagggctccgctaatggcagcag

SEQ ID NO: 278 - DNA, 402 bp, Homo sapiens
gacagggggtgagcgaaagcatgaagaaatgaacagaatctgggctgaatttctttaaggttataaagcactctatgcaatctgaggcaggcagtccccaagcttctagtaccaccctgcgactctacgtgtcaaacaggaggagttccttaaagggtgtttggtgtgtgcatgtgtgtagagggatgaagcatgtatacactctttgtatacatcagacactgtgctgggcactgcccttaaattatctcacttaattgtcacacagtcctatgaagcagatgctgttattgtctcagttttagagacaagaaaactgaagctcagagaaaagaagtgatgaccagcccaaggtcacatagctgctaagtgcagggacagcatcagaacccaggcccgtct

SEQ ID NO: 279 - DNA, 402 bp, Homo sapiens
tggaactgacaacacaagaatcttccatctccttccttctcttcctccttttcttggctgtcatccaaaactttaggggaatgcattataaaccaacttgagagacagagaaaggctgtaggaagatccaactcaaaaacattttggtgtttgctttacctccgcctgagcgtccctggagataaaccctcctcactctcagcccaccattgctctgctatgtcaatttcagcagccggactctggggctgacatgcattgccccttctcaacccagacaccacttccttcagggaaggctccacataatggtgaagtgcacagactcagaagccgggcagtgctgttcagaacctggttctgcctttctcgggcgtgtggccttggataagtcatctactc

SEQ ID NO: 280 - DNA, 402 bp, Homo sapiens
aactttaggggaatgcattataaaccaacttgagagacagagaaaggctgtaggaagatccaactcaaaaacattttggtgtttgctttacctccgcctgagcgtccctggagataaaccctcctcactctcgcccaccattgctctgctatgtcaatttcagcagccggactctggggctgacatgcattgccccttctcgaacccagacaccacttccttcagggaaggctccacataatggtgaagtgcacagactcagaagccgggcagtgctgttcagaacctggttctgcctttctcgggcgtgtggccttggataagtcatctactctctatgagcctcagatccttcgtctgcaaaacagagctaatgcctcccttcttgggttgctgtggggc

SEQ ID NO: 281 - DNA, 402 bp, Homo sapiens
gtttgctttacctccgcctgagcgtccctggagataaaccctcctcactctcgcccaccattgctctgctatgtcaatttcagcagccggactctggggctgacatgcattgccccttctcaacccagacaccacttccttcagggaaggctccacataatggtgaagtgcacagactcagaagccgggcagtgctgttcaggaacctggttctgcctttctcgggcgtgtggccttggataagtcatctactctctatgagcctcagatccttcgtctgcaaaacagagctaatgcctcccttcttgggttgctgtggggcttaattgagaaggtatatgtgaaatgcctgctccataatagacacccgtttgagaattaacgtttgggttgttacagtgt

SEQ ID NO: 282 - DNA, 402 bp, Homo sapiens
gcccaccattgctctgctatgtcaatttcagcagccggactctggggctgacatgcattgccccttctcaacccagacaccacttccttcagggaaggctccacataatggtgaagtgcacagactcagaagccgggcagtgctgttcagaacctggttctgcctttctcgggcgtgtggccttggataagtcatctactcgtctatgagcctcagatccttcgtctgcaaaacagagctaatgcctcccttcttgggttgctgtggggcttaattgagaaggtatatgtgaaatgcctgctccataatagacacccgtttgagaattaacgtttgggttgttacagtgtgagcccatgggtctcaggcaacagacttgataaatacaggttcctctgcaac

SEQ ID NO: 283 - DNA, 402 bp, Homo sapiens
tgcattgccccttctcaacccagacaccacttccttcagggaaggctccacataatggtgaagtgcacagactcagaagccgggcagtgctgttcagaacctggttctgcctttctcgggcgtgtggccttggataagtcatctactctctatgagcctcagatccttcgtctgcaaaacagagctaatgcctcccttctatgggttgctgtggggcttaattgagaaggtatatgtgaaatgcctgctccataatagacacccgtttgagaattaacgtttgggttgttacagtgtgagcccatgggtctcaggcaacagacttgataaatacaggttcctctgcaaccacaatcctagtccttagcacaagcatgacactgcctggcatgtgctatccct

SEQ ID NO: 284 - DNA, 402 bp, Homo sapiens
ttgagaaggtatatgtgaaatgcctgctccataatagacacccgtttgagaattaacgtttgggttgttacagtgtgagcccatgggtctcaggcaacagacttgataaatacaggttcctctgcaaccacaatcctagtccttagcacaagcatgacactgcctggcatgtgctatccctcccatatccatcagccatgagcagacacagatccctcattatgagacttttttattctgagctagaatgtgacctcagaatctttcttaacacaatgcttcaagcagtcactaccagttgaacatagttgacatggaagatagatgaagtttatttgcattctagttctcaccaagtccatgttcactgctccatctgctcagtgcaggctgtctctctgc

SEQ ID NO: 285 - DNA, 402 bp, Homo sapiens
tgtgagcccatgggtctcaggcaacagacttgataaatacaggttcctctgcaaccacaatcctagtccttagcacaagcatgacactgcctggcatgtgctatccctcccatatccatcagccatggcagacacagatccctcattatgagacttttttattctgagctagaatgtgacctcagaatctttcttaacacagatgcttcaagcagtcactaccagttgaacatagttgacatggaagatagatgaagtttatttgcattctagttctcaccaagtccatgttcactgctccatctgctcagtgcaggctgtctctctgctctgtctcccacctgcttttgtgagtgtatgtttctatgtttgtgtatatgtgtgtttaaactcctcttccag

SEQ ID NO: 286 - DNA, 402 bp, Homo sapiens
tctcaccaagtccatgttcactgctccatctgctcagtgcaggctgtctctctgctctgtctcccacctgcttttgtgagtgtatgtttctatgtttgtgtatatgtgtgtttaaactcctcttccagagtgaaagaccatttcagtcttttgtgtgctgatttgtagaaatcattgaactttcagaatcccatttgcaactgtcatgtctgtggctggggatctccaagtaacatcagcttacgtctgggaaggacaaggggaatcaaagttagaagtcaggagagcaaaatccacacacagcatgcaccatcggccacctttaggagtgacacaagagatggtgtttgaatataaatttgaagtctttccaaagatttaacactcctttggctgacaacc

SEQ ID NO: 287 - DNA, 402 bp, Homo sapiens
tcccacctgcttttgtgagtgtatgtttctatgtttgtgtatatgtgtgtttaaactcctcttccagagtgaaagaccatttcagtcttttgtgtgctgatttgtagaaatcattgaactttcagaatcccatttgcaatgtcatgtctgtggctggggatctccaagtaacatcagcttacgtctgggaaggacaaggggtaatcaaagttagaagtcaggagagcaaaatccacacacagcatgcaccatcggccacctttaggagtgacacaagagatggtgtttgaatataaatttgaagtctttccaaagatttaacactcctttggctgacaaccataatctcaaggaggtaggcctaggctagagcaattatactttagggtaaccctagctgct

SEQ ID NO: 288 - DNA, 402 bp, Homo sapiens
aatttgaagtctttccaaagatttaacactcctttggctgacaaccataatctcaaggaggtaggcctaggctagagcaattatactttagggtaaccctagctgctataacaaataaaccccaatattgcagtaggctgaaacatagaattgtttttatcattcatataacttcttgatgggccagtagccttcttccactgtagtcactcagggacctagcctccttccatcttgttgctcccccaaccctaaggcatcctctacatctaggtgaaaggggagcagaaaatgtggtctctggcccaggaacaactctagtcttggagaagcacatgatatagtatggagatcacagccaggcctgccaccggcagcaattcagggctgggcaccagatca

SEQ ID NO: 289 - DNA, 402 bp, Homo sapiens
cccaaccctaaggcatcctctacatctaggtgaaaggggagcagaaaatgtggtctctggcccaggaacaactctagtcttggagaagcacatgatatagtatggagatcacagccaggcctgccaccggcagcaattcagggctgggcaccagatcagctgggtggagtcccagctggccaaggagtctgagcccaggtagctatgtggtcatcttgggcatggaacagggcagctcaaggaccagaggtcagctggcagggtccgcaccaagcctatccagggaagccctgccctgatcatggacaaggcctgtgtaatcctgatgtcagctgcttccctcccgaggacagcctgcagcagatggtcagagcctgttgccattaaacatttgagtggttc

SEQ ID NO: 290 - DNA, 402 bp, Homo sapiens
ctaggtgaaaggggagcagaaaatgtggtctctggcccaggaacaactctagtcttggagaagcacatgatatagtatggagatcacagccaggcctgccaccggcagcaattcagggctgggcaccagatcagctgggtggagtcccagctggccaaggagtctgagcccaggtactatgtggtcatcttgggcatggaagcagggcagctcaaggaccagaggtcagctggcagggtccgcaccaagcctatccagggaagccctgccctgatcatggacaaggcctgtgtaatcctgatgtcagctgcttccctcccgaggacagcctgcagcagatggtcagagcctgttgccattaaacatttgagtggttccaccagcatcccgatgagtctgggt

SEQ ID NO: 291 - DNA, 402 bp, Homo sapiens
gccctgatcatggacaaggcctgtgtaatcctgatgtcagctgcttccctcccgaggacagcctgcagcagatggtcagagcctgttgccattaaacatttgagtggttccaccagcatcccgatgagtctgggttcaccaagaaacattattgtaatgtgctccccaggcagctctgcctcagggagagacaatgccagagcatgacaacttcagcattcttgttctgcatggcagttgcatttctcattgtggtttatatgttggtcacatgatctgagctaatgggagtattcgcctgacagatgagtcccttttgctgggtgtgccagcaaaatcaggcttccaagcccccaaggctcactgccagaggctggggaattcgccaaggtaaatgccacc

SEQ ID NO: 292 - DNA, 402 bp, Homo sapiens
gatgtcagctgcttccctcccgaggacagcctgcagcagatggtcagagcctgttgccattaaacatttgagtggttccaccagcatcccgatgagtctgggttcaccaagaaacattattgtaatgtgctccccaggcagctctgcctcagggagagacaatgccaggcatgacaacttcagcattcttgttctgcatgagcagttgcatttctcattgtggtttatatgttggtcacatgatctgagctaatgggagtattcgcctgacagatgagtcccttttgctgggtgtgccagcaaaatcaggcttccaagcccccaaggctcactgccagaggctggggaattcgccaaggtaaatgccaccttgtgaggtctttgggacacagccagcagcct

SEQ ID NO: 293 - DNA, 402 bp, Homo sapiens
caggagtgttctggaatcttctcctggagtgggagtaagggtgggcagagccatgtgatgctgcactgtccacctggttgaaggaagtaattccagactctgtctctgacatctctattagccaagggtgagggtgttagttcgggtcatgttagctgcgcctcccaccctgcatcctgggcccagaaaccacacccctgctgcagggcttctgtgtcagagtcaccagggaaatgggctgctgaggatgccagcaccaaccaggctgctgtcctggggcgacatgtctgccatcttacaacctcccttccaatattcaccatgtgccagctccagctcagtcactgagcctcacatcgctggaccccactgtgtgctcagggtcatcaggcactttcgcct

SEQ ID NO: 294 - DNA, 402 bp, Homo sapiens
ccaacctctcacccataccttttatctgattagctttttttttttttttttttttgagacagaatcgcgctctgttgcccaggctggaatgcagtggcgcgatctcagctcagggcaacctccacctaccaggttccagtgattctcctgcctcagcctcccaagtagctgggattacaggtgcctgccaccacacccggcttaatttttgtatttttagtagacatgggctttcaccatgttggccaggctggtcttgaattcctgacctcaggtgatctgcccacttctgcctcccaaagttctgggattacaggtgtgagccaccgcacccggcctgattagttgcttcttcctgtcctttgggacctggtacaggcatcaccttctctgggatgcttc

SEQ ID NO: 295 - DNA, 402 bp, Homo sapiens
ggctggtcttgaattcctgacctcaggtgatctgcccacttctgcctcccaaagttctgggattacaggtgtgagccaccgcacccggcctgattagttgcttcttcctgtcctttgggacctggtacaggcatcaccttctctgggatgcttcccttgtccctccctcatcacaaggctggcttgggtgacctttctccagtgctccaaaactcccttgctcctaagcagccccagcatggagctccaagccatgaagctctaatatcagagtccaagccttatagagcttccagggtctgacacatggcagaagttaaattaaactatgtatttgtttatttgctaacattctgccttattacaaaagagacttgagtcaactaagcaaataaatgtttg

SEQ ID NO: 296 - DNA, 402 bp, Homo sapiens
taacattctgccttattacaaaagagacttgagtcaactaagcaaataaatgtttgcagagctgaattaaactgagacagggtactggcccagtagaaaagtagaaaatacctgggcttgggcatcaggaagacctgggtgagaattctccagacctgtgccttctatggaacattaaaaaggtcactttccctctcaaaagcctcagttagctcttcagggcctgcgaacggcaatctattgtgaggacctggtgtgtgagccaagtgcacccatcagccactcacagctgcagcagaaccaggcagttgagtttgacattggccttttaagctagtcacgaataatcagaagacccatggcaggctgtcactagtgattttgcttaggtacaaacttgaa

SEQ ID NO: 297 - DNA, 402 bp, Homo sapiens
gagtcaactaagcaaataaatgtttgcagagctgaattaaactgagacagggtactggcccagtagaaaagtagaaaatacctgggcttgggcatcaggaagacctgggtgagaattctccagacctgtgccttctatggaacattaaaaaggtcactttccctctcaaagcctcagttagctcttcagggcctgcgaacaggcaatctattgtgaggacctggtgtgtgagccaagtgcacccatcagccactcacagctgcagcagaaccaggcagttgagtttgacattggccttttaagctagtcacgaataatcagaagacccatggcaggctgtcactagtgattttgcttaggtacaaacttgaatggtgctccttggagttctgatgtgggaga

SEQ ID NO: 298 - DNA, 402 bp, Homo sapiens
aattaaactgagacagggtactggcccagtagaaaagtagaaaatacctgggcttgggcatcaggaagacctgggtgagaattctccagacctgtgccttctatggaacattaaaaaggtcactttccctctcaaagcctcagttagctcttcagggcctgcgaacggcaatctattgtgaggacctggtgtgtgagccaacgtgcacccatcagccactcacagctgcagcagaaccaggcagttgagtttgacattggccttttaagctagtcacgaataatcagaagacccatggcaggctgtcactagtgattttgcttaggtacaaacttgaatggtgctccttggagttctgatgtgggagagtcactgagctggacgttagcacacacagttaca

SEQ ID NO: 299 - DNA, 402 bp, Homo sapiens
tgcacccatcagccactcacagctgcagcagaaccaggcagttgagtttgacattggccttttaagctagtcacgaataatcagaagacccatggcaggctgtcactagtgattttgcttaggtacaaacttgaatggtgctccttggagttctgatgtgggagagtcactgagctggacgttagcacacacagttacacagctcacaggctcaccccagcatgcatgtctcaaaacaatatattttcctctatttgtccttgggttttcagttacagcaaaagtattttcaaaacaaaacaaaatgcatcatgatacaatctcatatcaagtaacattcatttggggggacgcacttaaattaatagtttcataagcggttgttgtcctgcatttacagac

SEQ ID NO: 300 - DNA, 402 bp, Homo sapiens
tctgtgttatgctgtgaggtgctggttctggggacggaggagtgttctgccttaacaaccgaatggactgtatttgtggggaggtgtgggaaaccaaggagctcttaccaggagaatggatgttgggccagcagaaacaaaatatgttactgccttcttcaagtacacaggtttctgtaaagcctaacatcacactgaggacaccacttgccccaaactccagcctgaaggattatgaggagttcgagcttgcctttgcagggcgcctgcttcctgttaggactgtgctcattgtacatggaccttcttctgaacctctgagattggttctgttatctttattcccattttacagatagccaaccacaaacttactgggtggagtaacagtgttgcccagag

SEQ ID NO: 301 - DNA, 402 bp, Homo sapiens
cccaaactccagcctgaaggattatgaggagttcgagcttgcctttgcagggcgcctgcttcctgttaggactgtgctcattgtacatggaccttcttctgaacctctgagattggttctgttatctttattcccattttacagatagccaaccacaaacttactgggtggagtaacagtgttgcccagagttagagcttagtaaatggcagagttggagtttggacctatattaaacagtctaacttcacagggcagactcttagccatcaagcaatatggtcttccccgagaatgtctccccacttcacccttccaggcctttcttcttgttggactctagactttaaatgcccttctttttacttcctgctcacttattaaactcttccttgaatgctc

SEQ ID NO: 302 - DNA, 402 bp, Homo sapiens
tagagcttataaatggcagagttggagtttggacctatattaaacagtctaacttcacagggcagactcttagccatcaagcaatatggtcttccccgagaatgtctccccacttcacccttccaggcctttcttcttgttggactctagactttaaatgcccttctttttacttcctgctcacttattaaactcttcctgtgaatgctcctcctcctgatagttttccccaggattaaatctgagcaagacccttttctacaagaccaaggtcaccatgccactgctgactacagctggtgtatttgtttgtcctaacccttggagggcagagactaaatttattgtttaccactctggcacctagtacactgcctggcacagagtaggtgctcatggctc

SEQ ID NO: 303 - DNA, 402 bp, Homo sapiens
ccgagaatgtctccccacttcacccttccaggcctttcttcttgttggactctagactttaaatgcccttctttttacttcctgctcacttattaaactcttccttgaatgctcctcctcctgatagttttccccaggattaaatctgagcaagacccttttctacaagaccaaggtcaccatgccactgctgactacagcttggtgtatttgtttgtcctaacccttggagggcagagactaaatttattgtttaccactctggcacctagtacactgcctggcacagagtaggtgctcatggctcataacatgtttattgattgtttagatggcaacacagataaaatcaaaacatggaaggttgctgagactcaaagacaggattattattgttggtaa

SEQ ID NO: 304 - DNA, 402 bp, Homo sapiens
ttctttttacttcctgctcacttattaaactcttccttgaatgctcctcctcctgatagttttccccaggattaaatctgagcaagacccttttctacaagaccaaggtcaccatgccactgctgactacagctggtgtatttgtttgtcctaacccttggagggcagagactaaatttattgtttaccactctggcaccgtagtacactgcctggcacagagtaggtgctcatggctcataacatgtttattgattgtttagatggcaacacagataaaatcaaaacatggaaggttgctgagactcaaagacaggattattattgttggtaatgatctgatagctaatgagtattatattaataatagtcaacatgtcaggtactataatagaggctttg

SEQ ID NO: 305 - DNA, 402 bp, Homo sapiens
aagaaactgggagtcaaggaggtgaaatggctttcccaaagtcttgcatataatgtatccggactgcaaggatggggccctctggccccctcaacaccctatctgcctctcatacccagggacctgcccacaaggtcagccccttggcaatcttgccaaccttggggctcaaaattcagtttatggcttcccaagatctacttggatgctttttctaagtttggagaattcatgacattatgaatcctttttccccaaggtgggtattcaaactcagagttccagccacgcttgcatccagggctcagatagcagagggacctgcctgaggcttgatttagaagggtccacctgaggatgtggatgaagcgtgaattcatttctggcaggggtggcagcaga

SEQ ID NO: 306 - DNA, 402 bp, Homo sapiens
gtcaaggaggtgaaatggctttcccaaagtcttgcatataatgtatccggactgcaaggatggggccctctggccccctcaacaccctatctgcctctcatacccagggacctgcccacaaggtcagccccttggcaatcttgccaaccttggggctcaaaattcagtttatggcttcccaagatctactggatgcttttctctaagtttggagaattcatgacattatgaatcctttttccccaaggtgggtattcaaactcagagttccagccacgcttgcatccagggctcagatagcagagggacctgcctgaggcttgatttagaagggtccacctgaggatgtggatgaagcgtgaattcatttctggcaggggtggcagcagaggcagacagctc

SEQ ID NO: 307 - DNA, 402 bp, Homo sapiens
gtgggaaggcagcatgagctctggactataaagagaatcagttgaggatgtggcagcaaacaggtatactaggggatcaacgaggggaattattatgatgatgggcctttggaaacctctgccttctacagcagtactttgaaactcttgtgcacacagatcacctaaggatgttgttagcatgcaaattctgattcaggacgtttggggctgggacctgggatcctgcatttccaatacccttctccacttaagttttgctgatgctggtagtctgaggaccaccaatgaggtggtgaggttccagggacgcttaagcctccagcaaaacatcacacaagacagaagtgcctacttcaattgcatgagataatgagaccaaatcatccccgggcaagccca

SEQ ID NO: 308 - DNA, 402 bp, Homo sapiens
ctgattcaggagtttggggctgggacctgggatcctgcatttccaatacccttctccacttaagttttgctgatgctggtagtctgaggaccaccaatgaggtggtgaggttccagggacgcttaagcctccagcaaaacatcacacaagacagaagtgcctacttcaattgcatgagataatgagaccaaatcatccccagggcaagcccaccactaacaattattcccatcattggtaacatcctaagtcctaaggtacctggagcttcaaatctcataattagcactcttgttatgccaagcctgctcctaatgaggacactttgataattcgctttgttgaagaaacaggatctgttcctttcccctacagtacagcatgataggagtgtggtttgct

SEQ ID NO: 309 - DNA, 402 bp, Homo sapiens
gccaagcctgctcctaatgaggacactttgataattcgctttgttgaagaaacaggatctgttcctttcccctacagtacagcatgataggagtgtggtttgctatttgtacctgtaactcagcccagggagtgctgacaatgggggagccactgcaggagtcccagcctccccacctcatgccccaccccctgtcctaacgccccacccttcccagcaaaggaaagtaggcccctgaagcagttgtcctgtcctctagaatcctctagaatccagctacaaacatccaagtcctgcccccatcttcccgatctaactcacaccatttgtcatagtgacctggcctcagcctctttcaacttcttctctcactgccacacctttgcgtaggcagctctccag

SEQ ID NO: 310 - DNA, 402 bp, Homo sapiens
agctggaggggagggtcacagtccctcacagtcccttctccagtgacaagcaacaaactcccagtcttcctttctttctgatcctctcctcctcttcctccttctcctcttcctcctctcccagtccaaggaagttttatgcaaaggccagaggagggaataatgaggtggaggtctctctgaccaagcatgtagccttcctggatctgttgtgctttccaggagtccttcaaagctctaagcttttggaattctgcaagctcaggaaattgaaaaccttttctctcacaactgcaggtctttgtctgcagttgtaaaagtctgtttagaaactcaggagacaagcagcatcttctttgttccctgctttctggaggcagtcagcgtggaacaccctgcctg

SEQ ID NO: 311 - DNA, 402 bp, Homo sapiens
tagccttccggatctgttgtgctttccaggagtccttcaaagctctaagcttttggaattctgcaagctcaggaaattgaaaaccttttctctcacaactgcaggtctttgtctgcagttgtaaaagtctgtttagaaactcaggagacaagcagcatcttctttgttccctgctttctggaggcagtcagcgtggaacaaccctgcctgcagtctgactcagggaaagggtcactgagtgtgtgtgtgtgtgttgaggggtggataataagcaaggagaacactcagacagagagctcacagaggggcaccccagcacctccctcacctctatattccccgcctgggcatagtggagggagggttaatgccagccaagtttaacaggcatttctgattcgc

SEQ ID NO: 312 - DNA, 402 bp, Homo sapiens
gaactatgctctgtcatttacttactgtgtgtcactggatcagtcactcaacaccgctaagcctcattttccacctcttcaaaagggatctaataaacctgttagcagaaggctgctgtgaacactaaatgaggtggcttaggtgagagctctggtctgaagatgctcacactttgaatctcaagacttgtgtgaaccaagtatcagatttctcctattagattgcaattctcagggagtcacattccgtctccaaatgcccatctcctgatccacaaaatgagcacaacatctctgataaacggtaactagatggttccagtgggcagcgggagtgggagggcggttgactgggccagaacctcaaatgtattcctgtgtagtttctcatgcattcattca

SEQ ID NO: 313 - DNA, 402 bp, Homo sapiens
tggatcagtcactcaacaccgctaagcctcattttccacctcttcaaaagggatctaataaacctgttagcagaaggctgctgtgaacactaaatgaggtggcttaggtgagagctctggtctgaagatgctcacactttgaatctcaagacttgtgtgaaccaatatcagatttctcctattagattgcaattctcaggagagtcacattccgtctccaaatgcccatctcctgatccacaaaatgagcacaacatctctgataaacggtaactagatggttccagtgggcagcgggagtgggagggcggttgactgggccagaacctcaaatgtattcctgtgtagtttctcatgcattcattcagtttggcaccagaaggtgcccagactcactttgca

SEQ ID NO: 314 - DNA, 402 bp, Homo sapiens
tcaacaccgctaagcctcattttccacctcttcaaaagggatctaataaacctgttagcagaaggctgctgtgaacactaaatgaggtggcttaggtgagagctctggtctgaagatgctcacactttgaatctcaagacttgtgtgaaccaatatcagatttctcctattagattgcaattctcagggagtcacattccagtctccaaatgcccatctcctgatccacaaaatgagcacaacatctctgataaacggtaactagatggttccagtgggcagcgggagtgggagggcggttgactgggccagaacctcaaatgtattcctgtgtagtttctcatgcattcattcagtttggcaccagaaggtgcccagactcactttgcagccagtctgtcc

SEQ ID NO: 315 - DNA, 402 bp, Homo sapiens
tgaggtggcttaggtgagagctctggtctgaagatgctcacactttgaatctcaagacttgtgtgaaccaatatcagatttctcctattagattgcaattctcagggagtcacattccgtctccaaatgcccatctcctgatccacaaaatgagcacaacatctctgataaacggtaactagatggttccagtgggcagcagggagtgggagggcggttgactgggccagaacctcaaatgtattcctgtgtagtttctcatgcattcattcagtttggcaccagaaggtgcccagactcactttgcagccagtctgtccccatagaggtgataaaggaaaaacatatgcacatttaaacttttaaaagtttatttgaacattcagcgattcacaaacggta

SEQ ID NO: 316 - DNA, 402 bp, Homo sapiens
cagcgggagtgggagggcggttgactgggccagaacctcaaatgtattcctgtgtagtttctcatgcattcattcagtttggcaccagaaggtgcccagactcactttgcagccagtctgtccccatagaggtgataaaggaaaaacatatgcacatttaaacttttaaaagtttatttgaacattcagcgattcacaaactggtatagcacagacagcaagcaactagcactcctctaggaggggccaaacaggatacttttataaagaggttgcagaagcaagacaaagaaaaccattttaatgggttggaatggaaagttcctaattagaggttcattggtggctcctgattggtgcagcttctagtttcaacttactgtttacattggtctgtggttt

SEQ ID NO: 317 - DNA, 402 bp, Homo sapiens
actttgcagccagtctgtccccatagaggtgataaaggaaaaacatatgcacatttaaacttttaaaagtttatttgaacattcagcgattcacaaacggtatagcacagacagcaagcaactagcactcctctaggaggggccaaacaggatacttttataaagaggttgcagaagcaagacaaagaaaaccattttaaatgggttggaatggaaagttcctaattagaggttcattggtggctcctgattggtgcagcttctagtttcaacttactgtttacattggtctgtggtttgtccccataggaacgtaaggtgtcagagccagctactcaggagaatgaggtgaaaggatcacctgagcagggtaggtggaggctgtggtaagcagtgattgca

SEQ ID NO: 318 - DNA, 402 bp, Homo sapiens
gaggttgcagaagcaagacaaagaaaaccattttaatgggttggaatggaaagttcctaattagaggttcattggtggctcctgattggtgcagcttctagtttcaacttactgtttacattggtctgtggtttgtccccataggaacgtaaggtgtcagagccagctactcaggagaatgaggtgaaaggatcacctgaagcagggtaggtggaggctgtggtaagcagtgattgcaccactgtactccaacgtgggcaacagagtgagacccttaaaaaaagaaggaagagagggagagggagaaggaggaggaggaggaggaggaggaggagaaggaggagaaggagaagaaggagaaggaggtggcagagctacagaagcacctgttgcccaggatgg

SEQ ID NO: 319 - DNA, 402 bp, Homo sapiens
gtcttgaactcctgggctcaagtgatcctcccaccagagcctctcaaagtgctgggattaccagcatgagctaccataccatgcccggcatagatttttttttttttttaacagaggctacagacaagactgactgcctggcctagagttgaggcccgggagacttgcctcctgtgtgcagcgggctgtgctggttgcctctggtttcccagagtctgatgaacatgtttcctccacaggcagtagctgcttcatttgtttttctcccagttttcatttctcattagctgctaaatcctccccatggctgcagaccctattgtagctgactcagccagtgggcacagcaggggctgggtcccagcgccgtctccgcaacctaggagaggtcaggggcagcag

SEQ ID NO: 320 - DNA, 402 bp, Homo sapiens
acagaggctacagacaagactgactgcctggcctagagttgaggcccgggagacttgcctcctgtgtgcagcgggctgtgctggttgcctcggtttcccagagtctgatgaacatgtttcctccacaggcagtagctgcttcatttgtttttctcccagttttcatttctcattagctgctaaatcctccccatggctgcaggaccctattgtagctgactcagccagtgggcacagcaggggctgggtcccagcgccgtctccgcaacctaggagaggtcaggggcagcagtgcctgcctggctctatctccaagtgtgcctcacccccactgacaggtcagattatccactgtccccagagacgttaggagggaggccgtgtcctccactcccctagctg

SEQ ID NO: 321 - DNA, 402 bp, Homo sapiens
ctggcctagagttgaggcccgggagacttgcctcctgtgtgcagcgggctgtgctggttgcctcggtttcccagagtctgatgaacatgtttcctccacaggcagtagctgcttcatttgtttttctcccagttttcatttctcattagctgctaaatcctccccatggctgcagaccctattgtagctgactcagccagctgggcacagcaggggctgggtcccagcgccgtctccgcaacctaggagaggtcaggggcagcagtgcctgcctggctctatctccaagtgtgcctcacccccactgacaggtcagattatccactgtccccagagacgttaggagggaggccgtgtcctccactcccctagctgacacactggaaggacgttctccttgac

SEQ ID NO: 322 - DNA, 402 bp, Homo sapiens
cgcaacctaggagaggtcaggggcagcagtgcctgcctggctctatctccaagtgtgcctcacccccactgacaggtcagattatccactgtccccagagacgttaggagggaggccgtgtcctccactcccctagctgacacactggaaggacgttctccttgacatctgacttaatgacagtggaaccaagcggggtgctccttgggtgaaggaaaaaggagggaagacttgagccttctttaatgtcaataccctgagcctgaggccacaagcaaaggccagcagcttctgcaggatagcagaagccaggagacagggaactggggagtgtacatttatttgcttctccaacaacaacaacaatatctaggtgtgcagtgagctcccacttctgctgat

SEQ ID NO: 323 - DNA, 402 bp, Homo sapiens
ccaacaacaacaacaatatctaggtgtgcagtgagctcccacttctgctgatgtgggactagacaaaagatgagaggggaccaccctcagaggctccctcctgcttggccccaaactctttgtaaatccagcaccccacccccagttgttccccttcaggaatcatcaccctctgaaaacctgcagaaattctcaaatccctagccccctttgcttctcacacttgtagaggtctttccctaagcaaacacctgctttgattattcagggagtgagaattaatatcattgtaaatctaactcaaacataattaagaagttaaatctacttttgagggaaaaagttctgattgctcatctccagaccagataaataagatttcaaatctccaagatctgcagc

SEQ ID NO: 324 - DNA, 402 bp, Homo sapiens
ctgatgtgggactagacaaaagatgagaggggaccaccctcagaggctccctcctgcttggccccaaactctttgtaaatccagcaccccacccccagttgttccccttcaggaatcatcaccctctgaaaacctgcagaaattctcaaatcccagccccctttgcttctcacacttgtagaggtctttccctaagcaaactacctgctttgattattcagggagtgagaattaatatcattgtaaatctaactcaaacataattaagaagttaaatctacttttgagggaaaaagttctgattgctcatctccagaccagataaataagatttcaaatctccaagatctgcagctcggtgtgaactgccctccgcctgtctcagccagaacatcaagtgga

SEQ ID NO: 325 - DNA, 402 bp, Homo sapiens
caccctctgaaaacctgcagaaattctcaaatcccagccccctttgcttctcacacttgtagaggtctttccctaagcaaacacctgctttgattattcagggagtgagaattaatatcattgtaaatctaactcaaacataattaagaagttaaatctacttttgagggaaaaagttctgattgctcatctccagaccaagataaataagatttcaaatctccaagatctgcagctcggtgtgaactgccctccgcctgtctcagccagaacatcaagtggaaaggggcctgaggaactgcctcctccagccccaccagtgtggagatgcagctcagtcttgccatctgtgaaatgggattgataatacctacatggttgtcttgagtttagctcataacc

SEQ ID NO: 326 - DNA, 402 bp, Homo sapiens
ctctgtgatttaacgctctctcactcccacacctgcagtgcaccggagttaaaaatgaccttggcaaacagccttatgtattctctgtctagagcagaggacagagtcaaagaaaacccactcagaagcctggagagcggctgaaagtgggggagggcaggaaaggagggaggcaggatggaagcatgcatctcctgggcagttagacttgctggattaaggagtggagagtcaaacatgggtagctctgctcagaaaaattattactgaaggagagattatgctccacaatctcaccagaatgtggctttgcaaagtgaaacgagggttcgttcctctgccagcacgaccaactctcccgggacaccccctcaggtccgtccttgtgccacaggccacctc

SEQ ID NO: 327 - DNA, 402 bp, Homo sapiens
tgctcagaaaaattattactgaaggagagattatgctccacaatctcaccagaatgtggctttgcaaagtgaaacgagggttcgttcctctgccagcacgaccaactctcccgggacaccccctcaggtccgtccttgtgccacaggccacctcacttcaggttggtggctcagagaggtagcagctcccatctaaatgtaggcttctagaaccttctcttctcctgctgagaaaggattgtgctgagtagtagaagcagctggcagtggagtcccctggcctggttcctacaatcccaactttgacaattgtgtgacctcggacaagtcaccttacccatctaagcacatgttgttttaactgtaaaatgaggaaaatagcattcaactcagggtatgaat

SEQ ID NO: 328 - DNA, 402 bp, Homo sapiens
gtgattctaggcaagtgatgtcaccactgagcctcagtttctccacctgtcatacaggcaggagtaaatgcctcctcaccccctttgttccttgtacaaacccttgccctggatgttctgtttgtcctcaggaccccctctccactgttggctggggaggctgacctgggaggactctgtgaatgaggcccctgccttccagacttcagctgttcatgacacaggcggagactgcgggcaggaggagagtgacacgaggtgtcaactcccaggctccctccctgagggttatagggcatggctctcttccatagctttctttgctcggccttttgttgatggttttcctcattcatcaaattggggtgctgagggcacccactgcttctgtcccagggcact

SEQ ID NO: 329 - DNA, 402 bp, Homo sapiens
aggctccctccctgagggttatagggcatggctctcttccatagctttctttgctcggccttttgttgatggttttcctcattcatcaaattggggtgctgagggcacccactgcttctgtcccagggcactgccctcttcgtgtgctttcccactctctccctacaccactgtacacagtccttttgttacacggccttcgcaattccccaatctgagggtgccattgtgtccagctgagaccctgaatgaagcaactgtcccgtctggccacagacctggcacaatttcccttcaggcacttaaagcaggagtaatgaacactgatgagttcagctcagtgctaatccctctacatgtgaaatctcagttcttcagagagccctgggaggaagctactac

SEQ ID NO: 330 - DNA, 402 bp, Homo sapiens
ttccccaatctgagggtgccattgtgtccagctgagaccctgaatgaagcaactgtcccgtctggccacagacctggcacaatttcccttcaggcacttaaagcaggagtaatgaacactgatgagttcagctcagtgctaatccctctacatgtgaaatctcagttcttcagagagccctgggaggaagctactacagccttttcccattttaaagatgagaaaactgaggctctgagaaggtttcacagccagagctaagcctagagcccttaatgactatcctcatgccctctccagtataggcaggaggctactgagtacacgtgcttgaacttccaaggcatgttctcaagtagaagtgtcctcctcacaactgctctgaggcacatgccatcggaa

SEQ ID NO: 331 - DNA, 402 bp, Homo sapiens
tgggttgcaatttttgggcatccggatctcagcaaatgtgcctgctcctcagaaaggccttcctggccgttctgcctgaagaagcccctgtccacatcaagggtcttgcatctcatcaccctgttttattttccccatagcgctcatcccaacctaaagtatcttgtgaacgtgctgctggtctgttatccattgtcctcagctagacttcaagcccccgaagagcagggacctggcctgcctgttcaccattgtctctagcacctagaactcaggcctggtacaggataggtgctcaacaagttgttaaggacaaatgtcaagaagtacctgggggaagtgaggggctgaattggggggaataggttctttggttatggcccaaaaattgctagaagttta

SEQ ID NO: 332 - DNA, 402 bp, Homo sapiens
tccattgtcctcgctagacttcaagcccccgaagagcagggacctggcctgcctgttcaccattgtctctagcacctagaactcaggcctggtacaggataggtgctcaacaagttgttaaggacaaatgtcaagaagtacctgggggaagtgaggggctgaattggggggaataggttctttggttatggcccaaaaatgtgctagaagtttaaatgtgtcttctaagcccagctctctgtgttctcaaggtcgcaaatattaagaactcagggtaaataaaaatgtatcctttccagtgcctgcatgcccacactgaaatgagaaaagattttttaaataataataataaaggaacgatctttcaacctgcgtgcgggtctcagcggctccacttgcctg

SEQ ID NO: 333 - DNA, 402 bp, Homo sapiens
ctatgtggatcttggggacaataatttatccacaattacactggagagcatggtgcttctcaggtaacaggtggaaattcacaagcccaccatgtgatgaagacctgcccttccctgaccacaatgctatgagtaatgactgagaagattgggcagcccatcctcagtaatgcaggatgcactgtggcccatgtctgaggctatctgaaatatcagaaactccagtgggcttaccatggtcccactcctgccataatggttgccttacagtggctttttcttccaaaccaacttgccttcaactgcagaaggtgaggtccccaaaacaccagtaggccataggatagtgtgcggccggtagaataagaacctcagacacttcccacttcccctggtagagaa

SEQ ID NO: 334 - DNA, 402 bp, Homo sapiens
tggccacaccgaaaggtaggtggaggctaacagatctaaggctgcccagtgtgccatttctgcactggatatgaaatgtgccctctctgagccctctctctgcctcagcgatctcatctatagaatgggggtatagagatagacaatctcatatgtgatcttaggcaagttcagatctcacagtttccaaacttcagtttcttccagctatgaagtatgagcttgataatcttggctgtgtgactttggacaaggcccttccactctctgagccttggtttcccatctataaaatgggccaatggtaggggtgggaaaaggatgacctctgaggtcccttccatacagctgcctctgattcttcattgcaagtgacccagtgttccatatgacccatagcca

SEQ ID NO: 335 - DNA, 402 bp, Homo sapiens
gcactggatatgaaatgtgccctctctgagccctctctctgcctcagcgatctcatctatagaatgggggtatagagatagacaatctcatatgtgatcttaggcaagttcagatctcacagtttccaaacttcagtttctccagctatgaagtatgagcttgataatcttggctgtgtgactttggacaaggcccttccacctctctgagccttggtttcccatctataaaatgggccaatggtaggggtgggaaaaggatgacctctgaggtcccttccatacagctgcctctgattcttcattgcaagtgacccagtgttccatatgacccatagccatctgtctgtcctttgtgccaggcctgaagcattccttttggactggtcatttctcaccgtc

SEQ ID NO: 336 - DNA, 402 bp, Homo sapiens
tatgtgatcttaggcaagttcagatctcacagtttccaaacttcagtttctccagctatgaagtatgagcttgataatcttggctgtgtgactttggacaaggcccttccactctctgagccttggtttcccatctataaaatgggccaatggtaggggtgggaaaaggatgacctctgaggtcccttccatacagctgcactctgattcttcattgcaagtgacccagtgttccatatgacccatagccatctgtctgtcctttgtgccaggcctgaagcattccttttggactggtcatttctcaccgtcaccccctggagtctgccccaatcatttctcagtccttctgactgtgaagtgtctgtctgaactcataatcagcttttagctggtcccaaa

SEQ ID NO: 337 - DNA, 402 bp, Homo sapiens
agcctctgcacctctctgaggtccatttgcacctctctgaggtccatttgcacatctacaaaaatgcgataacacctacctagcagagttcttaggagatccagataacaaattgaaaacatgccagataatgcctggcacattttagaagcttgagatctactactggttctcttccagttctcccatcgtagtaatatctatctacagagcaagatggggaaaatgctcactgccagatcccattctaaagaggtatctccatctacagatttattgcacccgggctcctagccatacgcccaaaagtcaaactgaacaacagtaataatatttattcagccatgtcacactgaactgaggacctgacttaagcaacaattcagatctgccaacatttac

SEQ ID NO: 338 - DNA, 402 bp, Homo sapiens
ctcactgccagatcccattctaaagaggtatctccatctacagatttattgcacccgggctcctagccatacgcccaaaagtcaaactgaacaacagtaataatatttattcagccatgtcacactgaactgaggacctgacttaagcaacaattcagatctgccaacatttactaagcacctactatgtggcaggccgcagtcgtgaccccctggagagagaaagatggattggaaagtgtagcatcaaaattaacagcttggtttggaagtcagacacacctcaggtgaagatatggattgagtcataaactccccatgtggcactgggcaggttcatcacttgaactctctagacctcagcttttaaatctaaaatgtcccatagagttgctacaaaga

SEQ ID NO: 339 - DNA, 402 bp, Homo sapiens
gggaggcatggcacattttttagacaaaatcctatcttagcacagtctaacagttttgattttgtttgactttcacagcacaataaataaagagggtcatttggggcaaatatttccaagctttatccattttcccataggcctcttccaatcgttagaagataacatttttctcctttgaagcacctgacaactttgtcagcttttctcttcttcggttgctaactagtttaactctgccagtttctcatttgcctgtagttaaatgtgaatggaaaagttatccaacaatacttttgctatttttatgaaatcctgaatctgtttaaagatttgcacttttcctcttcatcaatttcctttgaatttccattacatcatcagacatttacaacaaccaac

SEQ ID NO: 340 - DNA, 402 bp, Homo sapiens
ctgaatctgtttaaagatttgcacttttcctcttcatcaatttcctttgaatttccattacatcatcagacatttacaacaaccaacaagccgaaggaaaccaatagatctaggttaaatgagtaaggctagaaaccagcgttaatgggaggtaaaacttaagcgtgcataaaacgtttaagtgaccggctcattcgtaaagtatttttgtgttatgaagatttttacttctctatcaaaccttgtaacctcagagaattgaataatgacacttagttgtcaaattcaagataaccgacaagagaccgggcgtggtggctcacacctgtaataccagcactttgggaggccgaggccagcgaatcacctgaggtcaggagttctagaccagcctaaccatca

SEQ ID NO: 341 - DNA, 402 bp, Homo sapiens
cttagttgtcaaattcaagataaccgacaagagaccgggcgtggtggctcacacctgtaataccagcactttgggaggccgaggccagcgaatcacctgaggtcaggagttctagaccagcctaaccatcatggcggaaacccaatttctactaaaaataataataataataataaaataactgacaagaatttctaaagatagttcagaatagaaagcttactaagttgattcatttaatggttacccttgatattttaacatgtactattacatgttaacatgtacccactaaatgtctagatctcattgatacttcatttaactcctgaacaataatagcttttcagtgtttggactctggttacctccttcctgatgcataggctactgttcatcatt

SEQ ID NO: 342 - DNA, 402 bp, Homo sapiens
ttgtttcatttttgcaggattttttgctgtgtatataacacaagagtggcagtgttcttttcctcttactttagcattttaaagatttttctagagtccatcagtgtttgttgaaaaatccaccttattggtgcttccttgaaggtaatgtcttttttctttgttactgcttttgagaacttctctttacctttgttttcaggcattttgactatgatatgtgtagttatgattttctttgtgtttaactttttggagggcttggtgggcttcttgaatcaatgagttggtttctctcatcaattttcggaaactcttgatcattgtctttccaaattttgcttctgcccagtttctcttcttgccttctgggactccaattatgtgtatgttagacctttg

SEQ ID NO: 343 - DNA, 402 bp, Homo sapiens
tgctctttagaagttttgagcttttctggctatcttcaaaatctggcaaatatcttgaggggaaaaacagggatttatgtcaggccctttctctctctcatggaatgttgtctcctaagtcccgtgagtttagcagaaatttcattccaaccttccatcctcatttcccagccacctgagctgcatagagcacttagcagctgtcctatgcgttaaagccaacagtcacttggcttcttatatttcaggcttctcttgtttccaatccatcatgccagccctgcacaactgccaaaagtgctgcttggtttctgctttctccagtagacaacctctgcttgggccaatgccagtcctcaacccacgtccagaatcagcagttgcccacagggaagaaaactg

SEQ ID NO: 344 - DNA, 402 bp, Homo sapiens
cttgtttccaatccatcatgccagccctgcacaactgccaaaagtgctgcttggtttctgctttctccagtagacaacctctgcttgggccaatgccagtcctcaacccacgtccagaatcagcagttgcccacagggaagaaaactgtcaggagttatcagcctacagaggacccactttgtcctcatttccacagcttctctgatgtcttcaaattttctatttttgcggcttttctttttttttcttaatagttgttgcagtaggggagtcagcctgccacaatctactacatcttacctggaagcaataccttatcttgttatttttaagtcaacaaattagacattattattattaatatatacagcaatatttagagtcactcgcacataaatatt

SEQ ID NO: 345 - DNA, 402 bp, Homo sapiens
gtgacttaaaatttcctttttttaacttttattttaagtttaggggtacatgtgcaggatgtgcaggtttgttgcataggtaaatatgtgtcatgggggtttgttgaacagattatttcatcatccacatattaagcttagtatccattagttatttttcctgatcctctccctcctcccaccctctggtgggccccagtagtgcattgttcccatctatgtgtccttgtgttctcatcatttagctcacacttataagtgagaacatgtggtattcagttttctgctcctgtgttagtttgctaaggataatggcctccagctccatccatgttcctgcaaaggacataatcccctttttaatggctgcatagcatttcatggtgtatatatacctcattt

SEQ ID NO: 346 - DNA, 402 bp, Homo sapiens
taagtttaggggtacatgtgcaggatgtgcaggtttgttgcataggtaaatatgtgtcatgggggtttgttgaacagattatttcatcatccacatattaagcttagtatccattagttatttttcctgatcctctccctcctcccaccctctggtgggccccagtatgcattgttcccatctatgtgtccttgtgttctctatcatttagctcacacttataagtgagaacatgtggtattcagttttctgctcctgtgttagtttgctaaggataatggcctccagctccatccatgttcctgcaaaggacataatcccctttttaatggctgcatagcatttcatggtgtatatatacctcattttctttatcctgtctattgctgatggacatttagg

SEQ ID NO: 347 - DNA, 402 bp, Homo sapiens
ctctgcttggcttctgaacacccaaaagtaagctcttctgccttcactccatgtccactggagcctgggatcctctcataagaagctatatttactctaatgaaaaaaaatctcacctgggctgaaaaagcgtatgctatacatgagccttggttaacctaaactttcatccagagtttcaaggattaaattcctaagttactttttaaagcaaagagaagttagttccagtcctaggccatgataatgctcttggctgagaaaacctccttcgtttttttaaaatatggattctgagggtgcaagtgcagtttcgttatatggaagtattgcacagtgatgaagccatggcttttagtgtacccatcatccatatagtgtacattgtacccaacaggtaat

SEQ ID NO: 348 - DNA, 402 bp, Homo sapiens
gccttcactccatgtccactggagcctgggatcctctcataagaagctatatttactctaatgaaaaaaaatctcacctgggctgaaaaagcgtatgctatacatgagccttggttaacctaaactttcatccagagtttcaaggattaaattcctaagttctttttaaagcaaagagaagttagttccagtcctaggccactgataatgctcttggctgagaaaacctccttcgtttttttaaaatatggattctgagggtgcaagtgcagtttcgttatatggaagtattgcacagtgatgaagccatggcttttagtgtacccatcatccatatagtgtacattgtacccaacaggtaattcaccatccctcaacccccctcctctgttttaaggaact

SEQ ID NO: 349 - DNA, 402 bp, Homo sapiens
atctcttattgatctgagaattcctcccaaaacaatccctctaaaagtgcctgattcataatccagtgaatgttaacaggaatgacgatgatgattatgatggtgatgatgatggcaatgatgatgatggtgatgatgatggtgatgacaatgatggtgatgatgatggtgatgatgatggcaatgatgatgatggtgatagatgatgatggtgatgacaatgatggtgatgatgatggtgatgatgatggcaatgatgatgatgatggtgatgacaatgatggtgatgatgatggtgatgacaatgatggtaacagtgatgatgacaatgacaatactggtgatgatgatggtgatgacaatgatggtaacagtgatgatgataatgacagtactgatgat

SEQ ID NO: 350 - DNA, 402 bp, Homo sapiens
gacaatactggtgatgatgatggtgatgacaatgatggtaacagtgatgatgataatgacagtactgatgatgatgatgatggtgatgatgatgacaataatggtgatgacaaggttgatgataatggtggtgatggtgatattggtgatggcaatgatgatagagtttaatctgcaactccttcccttcactcaatgctagtggccaattggccaccaagaactgtgagtctacttcataagtaactaactcttaagctcatcctttaatttctttggaacagggcttaacctttctcaacagccccctcatctcatttaccttctttcagtgtgtgttcttccaatctgtctccacactgtgccaatgtaagcttcctaaagtttaagtctgggtacagg

SEQ ID NO: 351 - DNA, 402 bp, Homo sapiens
agctcatcctttaatttctttggaacagggcttaacctttctcaacagccccctcatctcatttaccttctttcagtgtgtgttcttccaatctgtctccacactgtgccaatgtaagcttcctaaagtttaagtctgggtacaggcgcactcactcactccgtgcacttttacacttttatgccttttttgtgttcttcctctacttgtgttttctccttcttgtcttttagcaagacatgtactcatccttcagggtccagctcaatggtgagagcctctctggggctttggctgatctcaccctggaatgcactgcaatgttcctttgcctaggttcctgcaatgctttctccatttatctgtataaccctcaccacttctaagattacgttattatct

SEQ ID NO: 352 - DNA, 402 bp, Homo sapiens
aatgttcctttgcctaggttcctgcaatgctttctccatttatctgtataaccctcaccacttctaagattacgttattatctgagtctgtggtgagggaacataccacatctgacctacggttcattgccagccccctcccagagtggaacactgaaggcacatgggcaactgttgcaaacgtgcagggtaaatgcacccgccatggagtgacagctatgcagaccagagcccccttctcccaggttctgtgttgcccacacctttcttgacagtcctgggccagggcttccccaggtttggaatccagatgagtctgaaagcaaatgtcattctctttccttcaccacacagtagcatttgttcttgccaaggtagctgtgtgtgtgtgtgtgtgcatgt

SEQ ID NO: 353 - DNA, 402 bp, Homo sapiens
gtgtgttgtgtgcgtatgtgtgtgtgagtgtgagagagaatgtgtgtgtgtgtgtgttcatgccgatgttcacgatgggctggagggaggaccagtcccctactgcgtagatcgaggatgctgcctttacccagtcttcatgaagttataaaaattacagccatttgtcacaggtctctcaacacagcactgggccctggagaggaccaggccacatctcttggcgtctgaaataaatgaactcatttattcacacattgaggccacacatgtttgttgcaagtctgtggccaggcacagggctgggagctggggaataaagagctgacccaaacagcagaaccagtttgcgttttcatggaattcatgatccgctgctctgacagtgggcatgggtcagac

SEQ ID NO: 354 - DNA, 402 bp, Homo sapiens
acagccatttgtcacaggtctctcaacacagcactgggccctgggaggaccaggccacatctcttggcgtctgaaataaatgaactcatttattcacacattgaggccacacatgtttgttgcaagtctgtggccaggcacagggctgggagctggggaataaagagctgacccaaacagcagaaccagtttgcgttttcagtggaattcatgatccgctgctctgacagtgggcatgggtcagacaatgaccaagtaaacagatcagtaagatcatttggagaaacgagaagggatccaaaggaaagaaagcaggaggccacgaggaggggagtgtggaggagtgaggggctgctttaaattcagaaatccttgaagactgtctaaggaggtggcgtttgt

SEQ ID NO: 355 - DNA, 402 bp, Homo sapiens
cagtcaggagctgtccaggccagctgacgctgacgatgagtggggcccagagcttagactccctgagactcagccctcctctcccgcaggaccccagcagccagccttggagggctcccaaagaatgacatcaccctcagctcccagctgcttgatatgcagggaattcctcccaaggctatgcagaggcctcaggcttcaggcagcaagctgcggcccgtgcctgggggagagaggaggggaaaatcgtaaccccagcagcacctcctcccgtgacctagactctgggccagacaccacaggcattttctggataatcctcacaactgccccatgagggacacctctgtcgaatcataaaatcctgaacagggaaggatgcctggagatcatgtgacctgt

SEQ ID NO: 356 - DNA, 402 bp, Homo sapiens
tcactccaggattttagttaagtcttgtctaacattgcagccaggctcagccattctgtaggaggattaaaggatgggactgtgtataaaattgggccaggatggcaagcgagggagcagctcttgaggccagaagagtgggggaagatggcttgatgacagacggaatctcaggcacctgaagagtcttagaagccagactttggggctgagccgcccttccccaagtggagattcaccagccatggccagactcgaggatgtgagatttatttttcttaagatagcaaatgtctttgcaggcatgcttcccagttgggaaattctttttatgctccatgtaatccgtctgccagagcctcctttgactctgtttatcggttctcttcctgtatgtgtcat

SEQ ID NO: 357 - DNA, 402 bp, Homo sapiens
gctctgcaccacccagagcctgttaggaagaaaggggggatacactcatcctggctccatttagggtgggcttttaatccagacatgtcgctgacaccagcatttgcaccaggtatttaattagaccaggaagtcccaggggatttgagaagctggctggcgaggaatgggctctatctccatatcttattttgacaagcagctgtaattatccctcattgctggcaggcggagcagaatcacgttcgttcccagccccatcttctcagaacaagagtactcaggctcctggttgctccaccactaaacaactgcctgtctcagttccccagcgagaccgagactgagctcagccattactcaggagatcgcaggcgggcgctcagcctactttttgacagc

SEQ ID NO: 358 - DNA, 402 bp, Homo sapiens
agaatcacgttcgttcccagccccatcttctcagaacaagagtactcaggctcctggttgctccaccactaaacaactgcctgtctcagttccccagcgagaccgagactgagctcagccattactcaggagatcgcaggcgggcgctcagcctactttttgacagcatcgtggaggtgatttcagagcgcttgctgcatagcacatgggaaatagcttccaaggaggatctttgggggcagaaggaatgaggtgggcaccatgccctccaaaaagacagaagttacccctccaggagccagcatgaatggagcacctaccatgtgcccatttggtattgaatttaatcttctcaatagcactgccaggtcagtgttatcattccatattaccaatagggaa

SEQ ID NO: 359 - DNA, 402 bp, Homo sapiens
tgttgtctgcatttcccttccctttctggtcagggaccccagctctctctgcatggattctcctctccaggaggtggggggtgggagccgatgtcaacagggaagaggggcagaggaacaaggacagggatggggagaggaagaaagaaggaggtgggatgtggcagctgggcccggaagcaggctagagccagctgcacaggctctgacaatctaaagtgtctcttccgatggtctccattcagccccatctgcagatagctcattttgtgaatgaggcctgggtgtttgttccagaaccttagctgtgattaggaaagacaggagcacttgggaggccccaccttcaatgcaccagagtatttctagaccctcattctgcagtcagctctagctgccaca

SEQ ID NO: 360 - DNA, 402 bp, Homo sapiens
cttctcagctgcaatacagggctaatacaggcatgcatcttatggagttgtcaaaaggatgaaacaaattcatgcatttaaaggacttggcacatggtgagtgctcagacatgttagccagtatccaggcatggtggctattttctggaataaatatggataaactgagacaactttctctcctgaagatgggtccattgctgaagtcatctcaaagaggtgtggcctggagaagtggttccagtacctcatgccttcttccccttccctccttctctcctgcctccccctgcattcttcatgtgcctcctgctgtaagcatttgctgagcctcctgctgtgtcccaagctctgtgcttggggtcaaccacccagaaatgaatcgtgtgggtcccatcctct

SEQ ID NO: 361 - DNA, 402 bp, Homo sapiens
gtaattacatcaagtgcctgtaatcctagctacatagaaggccgaggtgagtggatggcttgagcccaaaagttcaagaccagcctgagcaacatagtgagacccagtctccaaaagtaaataatttaagagaataaaaaattaattttttaaagaaggtttaaactggttgtgacctaaggaaacaatttcttccagccagcatcattgaacaggtgggacaccaagctcccttgtagataaagatcgaggtggaatgggagtggacactgactccatctaagatcatggaagcgctctcacagtgaccctactgggctctctggaagctgcatcccagcagctgtgcagcccctgggaccagccaggagtgacctgggtgctgccgttcaacccacctgt

SEQ ID NO: 362 - DNA, 402 bp, Homo sapiens
gtacatttcccaaaaagaggcagccaagtgctgattcagggaatttaaactttaatggtcccccggtctattattatgttttaatgaactggaaaagcacaaacagaaatccttaagagcatcagccgtgacacagaaatctaatacaataaaacaaagtgcttataaaccccagagttgtttaaaacccagaaattgccagattgacatatgggactatatcttcttagcccctagtaaactgagtggcttcaaacaagtccctatcacctcccagggcctcagtttcttcacctgtgaaataagaggatcaaaaaaagataatgttctctctgttctcttccaaccgaggcaggcatctcaagtatttcttagtcagttctactctaggctacacagtat

SEQ ID NO: 363 - DNA, 402 bp, Homo sapiens
tctgtcttaccacctaaactcctctagaaaacttgatagaggtaaagataaatgcattttttcaaaaattctacttttctagtcccaaggcattgtgtatatcattcttatgtaagttatcacaataaacccataattagttacttccatttatgtcaaatcgcctacaaagcagaaacatgtattattcatttttggctgtcctccccagtatctagcatacgaactgtttgcaaacatgcccagttcttcaaactttgtaacttcatgccttttctatctactacttgggatgggcccaccctccctttgtcctctaagcacactcctattcatccttcaaagtccagcacaaaaatcccctcctctgttaaacttcaactgctccaggctgagtcttat

SEQ ID NO: 364 - DNA, 402 bp, Homo sapiens
tgtgtatatcattcttatgtaagttatcacaataaacccataattagttacttccatttatgtcaaatcgcctacaaagcagaaacatgtattattcatttttggcttcctccccagtatctagcatacgaactgtttgcaaacatgcccagttcttcaaactttgtaacttcatgccttttctatctactacttgggatagggcccaccctccctttgtcctctaagcacactcctattcatccttcaaagtccagcacaaaaatcccctcctctgttaaacttcaactgctccaggctgagtcttatgtttgggtccttcatacgtacccctcttctattgtttggggtattgtgtgctgtgggatctgtttactctcagttctcccctctaggctgggt

SEQ ID NO: 365 - DNA, 402 bp, Homo sapiens
gagtcttatgtttgggtccttcatacgtacccctcttctattgtttggggtattgtgtgctgtgggatctgtttactctcagttctcccctctaggctgggttccttgaaaaacaccctctggacatttcacctctacatcctctgcattcttggccaggctctgagagggcattggtaaatgttaactgcctggcaatgagtgatgctgttaacctgatgtgtcaggggtctgaataaagctgcctcaaggtaggcagatgcccacaaccaagcaagaactcaaagctgcaggctcctcagcctgaaccttagacagcgtcttggtcaccatttcaacaccttgaccacatttctcactctcccaaatttcctcctgcttattcctcatccacatacataa

SEQ ID NO: 366 - DNA, 402 bp, Homo sapiens
cctctaggctgggttccttgaaaaacaccctctggacatttcacctctacatcctctgcattcttggccaggctctgagagggcattggtaaatgttaactgcctggcaatggtgatgctgttaacctgatgtgtcaggggtctgaataaagctgcctcaaggtaggcagatgcccacaaccaagcaagaactcaaagctgtcaggctcctcagcctgaaccttagacagcgtcttggtcaccatttcaacaccttgaccacatttctcactctcccaaatttcctcctgcttattcctcatccacatacataaggctgtgtctcccaggggaaattcaactacttggtaattatcctgcttcttaagtttggggctaggggattcatagatgatgttcagt

SEQ ID NO: 367 - DNA, 402 bp, Homo sapiens
ctctgttcatctccctctgtcccctctatgtatgtttgtgtctctttctgtctcctctgcctttctttgtcatgtctttctgcttctgtcctatactgtctctcacctccaccctggttccccccgccccagatgctcttctctctgtggggttttttcttcccctccatttccttctcctctcccactccttcctccccaggattctccctcactacaggcttctctctaatctctctctaactgcctattcttctcacaagaaggagtcccctctggggcccagaggccaggcaaggcattgtggacaaggagggcatccgtgccatccaacgggcaggagcccagcctcctggctggtgcgtggctgtgctgtgggtttgtttccacttaccaaagggc

SEQ ID NO: 368 - DNA, 402 bp, Homo sapiens
ccctccatttccttctcctctcccactccttcctccccagattctccctcactacaggcttctctctaatctctctctaactgcctattcttctcacaagaaggagtcccctctggggcccagaggccaggcaaggcattgtggacaaggagggcatccgtgccatccaacgggcaggagcccagcctcctggctggtgcagtggctgtgctgtgggtttgtttccacttaccaaagggcatctgtaattaatgtgggcagtgataaaggagctggagatgtgtttatgctccttcgagggctgagatgaaacacccataacatttaatgtggcgcactgacatttaaatgtcaattagaaagtccccgctctgcttggctggcccctgcatcctcagatga

SEQ ID NO: 369 - DNA, 402 bp, Homo sapiens
cagatgagaccgccctcctccctgccttgccagccctgctgggaccaccagctcacaaaagacagtggccacacagcaaccgtgactgaagagtgtgcagggtccaaagaggctaaagtggctttaagagcactccggagggggaggactcttggaacagagaaaggaggaggatggtgccaggccaccaccaaaggcacagtggaagggggctgggcaaatggtgaaggagcatgtgggagacaagtttagaggtagcgttggcttcctcctctcttccctcagtacctacagggcagaatctagagcttgtttgtgccttggcccttaggcgctatgtttctgcctctgtggttgatcaccctccattagaccaagggcttcttgagaccaggttcccat

SEQ ID NO: 370 - DNA, 402 bp, Homo sapiens
ccacgacatgctccattttctcataaaagcccttccaacaaggggcacatttgcatttcaagtttcctggaattggagtacagagaaatctgacttccagagcccagggctctaagctgcagctggagaactgaaacacagcaagcaggacacctgcccagaataaggttcaggccctggaatatcacatgggacccatgactcctgtagctgtctgcagtctcgagccccaaggcagtagaacaggtgttcatcttctcctgcactctggaaatggagtccagggcctgagctactgagtttgtagactgcaactttggtagcaagaggcatttctcctcctcacctccacccacacacagatctagttcccctcgtacgctgccctttcagtcttggaca

SEQ ID NO: 371 - DNA, 402 bp, Homo sapiens
ccgactttggatcaatcagttgctcagtttattggaattacatcccagtggctgctattgatggaactgctggactcgggcccacaatcctcatgccagttttataacactgacatcacctgctcacacacagggcttcctctcccatcctgtccccatacctcactctgtagcctgagatttctaaggtgggggatctgctactgggtgtttggcataaatgatgtaagagatttcctttgtattgctctcagctacatcttacctttgtgtaagaatgcaaagtcataagcacagtttacaattgcaatgggaggtatgtgctagttttaaggtgttttgtttttttttttgtttgtttgtttgtttgagacagtttcactcttgttgcccaggctggag

SEQ ID NO: 372 - DNA, 402 bp, Homo sapiens
cttggctcactacaacctctgcctcccaggttcaaacgattctcctgcctcagcctcccaagtagcttggattacaggcatgtgcccccacacctggctaattttgtatttttagtagagacagggtttctccatgttggtcaggctggtttccaactcctgaccttgtgatcagcccgcctgagcctcccaaagtgctgaggattacaagcgtgagccactgcatcaggcgttttaagtttctaccatttggggcatattcaggaagattcctatcccaacacaccccttccttctgcttttataaacacacagagtccccaaccaccctacgtcctctttcctccataaccacgtcacagtgcactgtaaacacattacgaaccagctatgcaataacaa

SEQ ID NO: 373 - DNA, 402 bp, Homo sapiens
ataaacacacagagtccccaaccaccctacgtcctctttcctccataaccacgtcacagtgcactgtaaacacattacgaaccagctatgcaataacaatctgctgaatctcagagatgcagaaagaaatcactgggccttctattgatacattcttatgttatcatttttaatttctataattatgtttttaaggtacacttgtgtatcagcacagcagcagatgctaataatatattaaaaactgtactcgtgttctgggagtgttcacaaattatagcttcacactattctcatcttctcccgcctctgctcagatgtccttgaaacatctctaaggatcctggaaggcaaactgactacaacacttatttgcacagcacagcatctttcctatgacac

SEQ ID NO: 374 - DNA, 402 bp, Homo sapiens
tgggagtgttcacaaattatagcttcacactattctcatcttctcccgcctctgctcagatgtccttgaaacatctctaaggatcctggaaggcaaactgactacaacacttatttgcacagcacagcatctttcctatgacacgtcttttggtttttccaatcatcaaaagcaagaggtagcaggagaccgagctgttaaggcactgaccgtggcattgcctccagggtgaattgcgggggcacaggaaaaacagctcagattcctagcttttccccaccttcctgatctactgaaccacactttctccagggatgtggcccgtgatctatattttaagaaaacacctcaaataacttcccagccaggtgtgtgcaccacagtgctgggacgtggtattgt

SEQ ID NO: 375 - DNA, 402 bp, Homo sapiens
ggacacgttctgctcccttctgattcccacagagagaacacagcctctgcctgccaattagtgacgttcagatctctattagagatggggacagctagttccagttatgcaaatgcccttgtctgagagtagccatgggccagcagcatgccagtctcacctctccccatggagtcaccatggatgtgacttgcacctccctgtgttgctttaaccaataatcaaatcagtatctatttatataagcactggccaaggtactgcaggaagctcagggacagattttatttcagcctaaaggaacttacactgagtagagagtgtggccagggaaagggcagatctttcaaagacactctgttcttctctaaacactcacagtttctatttattacccaaaaa

SEQ ID NO: 376 - DNA, 402 bp, Homo sapiens
ggagtcaccatggatgtgacttgcacctcccgtgttgctttaaccaataatcaaatcagtatctatttatataagcactggccaaggtactgcaggaagctcagggacagattttatttcagcctaaaggaacttacactgagtagagagtgtggccagggaaagggcagatctttcaaagacactctgttcttctctaaatcactcacagtttctatttattacccaaaaaaatacataaggaaaaatacctaacatttgttaagtacctactatgtgccaggcactgttagacactttatacacattatctcattcaagtccattaattttatataagaagcaatatgctatttggttcaaggcatgtgttttaagtaggaaaaactaggatttttaaaa

SEQ ID NO: 377 - DNA, 402 bp, Homo sapiens
atgtgacttgcacctcccgtgttgctttaaccaataatcaaatcagtatctatttatataagcactggccaaggtactgcaggaagctcagggacagattttatttcagcctaaaggaacttacactgagtagagagtgtggccagggaaagggcagatctttcaaagacactctgttcttctctaaacactcacagtttactatttattacccaaaaaaatacataaggaaaaatacctaacatttgttaagtacctactatgtgccaggcactgttagacactttatacacattatctcattcaagtccattaattttatataagaagcaatatgctatttggttcaaggcatgtgttttaagtaggaaaaactaggatttttaaaactaggattttaat

SEQ ID NO: 378 - DNA, 402 bp, Homo sapiens
aaaaactaggatttttaaaactaggattttaatcctgccactttctccatgtgggacttcttgacctcagttattcatctgcgaaatggaaggaaacaatgtctgtttgccaggaatattttcagaagcaattagataaggtatttaaatccaagcacctcatcttcatatgacacagcatagtgttaagatgcctaatactgtagggaaatgacaaaaatggacaaatgcaggatattattagcaacaatgcaaaaatatctgtatatggatgaagagtggaagaggacaattatgggggaaacttgttgtcttttaatttctgaactatctgtattattattattattttagatggagtctcactctgtctcctaggctggagtgcaatggttcaatctc

SEQ ID NO: 379 - DNA, 402 bp, Homo sapiens
ctgcgaaatggaaggaaacaatgtctgtttgccaggaatattttcagaagcaattagataaggtatttaaatccaagcacctcatcttcatatgacacagcatagtgttaagatgcctaatatgtagggaaatgacaaaaatggacaaatgcaggatattattagcaacaatgcaaaaatatctgtatatggatgaagagatggaagaggacaattatgggggaaacttgttgtcttttaatttctgaactatctgtattattattattattttagatggagtctcactctgtctcctaggctggagtgcaatggttcaatctcagctcactgcaacctctgcctcccgggttcaagcgattctcccgcctcagcctcccgggttcaagcgattctcccgcc

SEQ ID NO: 380 - DNA, 402 bp, Homo sapiens
aggaatattttcagaagcaattagataaggtatttaaatccaagcacctcatcttcatatgacacagcatagtgttaagatgcctaatatgtagggaaatgacaaaaatggacaaatgcaggatattattagcaacaatgcaaaaatatctgtatatggatgaagagtggaagaggacaattatgggggaaacttgttgtctttttaatttctgaactatctgtattattattattattttagatggagtctcactctgtctcctaggctggagtgcaatggttcaatctcagctcactgcaacctctgcctcccgggttcaagcgattctcccgcctcagcctcccgggttcaagcgattctcccgcctcagcctcccgagtagctgggattacaggcacc

SEQ ID NO: 381 - DNA, 402 bp, Homo sapiens
gacaaatgcaggatattattagcaacaatgcaaaaatatctgtatatggatgaagagtggaagaggacaattatgggggaaacttgttgtcttttaatttctgaactatctgtattattattattattttagatggagtctcactctgtctcctaggctggagtgcaatggttcaatctcagctcactgcaacctctgccctcccgggttcaagcgattctcccgcctcagcctcccgggttcaagcgattctcccgcctcagcctcccgagtagctgggattacaggcacctgccatcatgcatgactaatttttggttttttgtctgtttggttgtttgtttgtgtgtttgttttgtagagacagggtttcattgtgttggctaggctggtcttgagctc

SEQ ID NO: 382 - DNA, 402 bp, Homo sapiens
atatctgtatatggatgaagagtggaagaggacaattatgggggaaacttgttgtcttttaatttctgaactatctgtattattattattattttagatggagtctcactctgtctcctaggctggagtgcaatggttcaatctcagctcactgcaacctctgcctcccgggttcaagcgattctcccgcctcagcctccctgggttcaagcgattctcccgcctcagcctcccgagtagctgggattacaggcacctgccatcatgcatgactaatttttggttttttgtctgtttggttgtttgtttgtgtgtttgttttgtagagacagggtttcattgtgttggctaggctggtcttgagctcctgatctcaggtgatccacccgcctcagcctccca

SEQ ID NO: 383 - DNA, 402 bp, Homo sapiens
gaagatatggcatggagtaccacgaacagaaagtctgtggccagcacctggatattcagagaaagagtgtgatttaggcttcagaagggcaggggtctgtagcttagggactgggcagagctgttacctagaaaagctagaaacagaaatgcataaatcccagttgtccctgacagtgggatacagtcagggcctgaagtagcaggggaaggccatcttaggtcagaggcagtggttcttggcatacagtggttttccccctaagaatgttaggcaatatttggtgacatgtttaatgagcacaaccaggttaagtatctactcactgctaatctctggtgagcagggagaccaggggtgctgctaagcatcctacaaggcctggggacctccccaccaact

SEQ ID NO: 384 - DNA, 402 bp, Homo sapiens
tcttaggtcagaggcagtggttcttggcatacagtggttttccccctaagaatgttaggcaatatttggtgacatgtttaatgagcacaaccaggttaagtatctactcactgctaatctctggtgagcagggagaccaggggtgctgctaagcatcctacaaggcctggggacctccccaccaactacagttatccagtcgcaaaatgccatagtgtcgctggggagaaaccctgatctaaggatgagtgagaaggtggatacaggaggtgaggaggtcagaagtcagaccaaacatcagatgggaagctaggaggaaaagaggtcagaaaaggagttatgaaccaaaggacaaaaggaagttaagtagtcagtcaggagatgaggatcatagaggagatc

SEQ ID NO: 385 - DNA, 402 bp, Homo sapiens
ggtcagaaaaggagttatgaaccaaaggacaaaaggaagttaagtagtcagtcaggagatgaggatcatagaggagatcaggcaaagagaagtccagaggtggaaaaaagcttcagagctcagacgggctgggctctaacaatcatcacagaagcagcaaagatcaagaagcaatggggaaggacagttgaggctagcgcctagggggaagggccattggtgaggagcctttctgatcagaagttggatggagaacaccatggtggatgtggatggaggtcaaagtgatgatgttctggaaagcagtttaaacaaaacaaggggcctgcgtgctttactaccagaggccatctgttaatggatgatgggaaatgccactcttggcccccacagtcaggagca

SEQ ID NO: 386 - DNA, 402 bp, Homo sapiens
actaccagaggccatctgttaatggatgatgggaaatgccactcttggcccccacagtcaggagcaggtcaccttcaactgggcacagcaacacgtcccactgcaggcaggcacaaaagcagaggctcattaaagagctgccctgggcccaggctacatccttggcaaaggatgagatttgcacccaaggtcaggatggcatcgggtgtgtggagcacgggctacggagccaggtcaatggagttctaaatccctgatcagcaaccttctacagatgtggcctttgataggtcactgcctctctctgaagctcagtttcctcacctataaaaatgggatcgataacagaggttacatctgtgtggatcacctaaactgtagaggattttgcaaatgtgttgt

SEQ ID NO: 387 - DNA, 402 bp, Homo sapiens
gaaatgccactcttggcccccacagtcaggagcaggtcaccttcaactgggcacagcaacacgtcccactgcaggcaggcacaaaagcagaggctcattaaagagctgccctgggcccaggctacatccttggcaaaggatgagatttgcacccaaggtcaggatggctcgggtgtgtggagcacgggctacggagccagagtcaatggagttctaaatccctgatcagcaaccttctacagatgtggcctttgataggtcactgcctctctctgaagctcagtttcctcacctataaaaatgggatcgataacagaggttacatctgtgtggatcacctaaactgtagaggattttgcaaatgtgttgttgtggttgccattcttattgctggaacataat

SEQ ID NO: 388 - DNA, 402 bp, Homo sapiens
tgccctgggcccaggctacatccttggcaaaggatgagatttgcacccaaggtcaggatggctcgggtgtgtggagcacgggctacggagccaggtcaatggagttctaaatccctgatcagcaaccttctacagatgtggcctttgataggtcactgcctctctctgaagctcagtttcctcacctataaaaatgggatctgataacagaggttacatctgtgtggatcacctaaactgtagaggattttgcaaatgtgttgttgtggttgccattcttattgctggaacataattccctcattagtatttctgagtgctctggtgcatatctgctgcagcagaatccttcatgcatccagcaaacatttcctgggcatgtagtatgtcccagacactgtg

SEQ ID NO: 389 - DNA, 402 bp, Homo sapiens
gagattaatttctgttctttgtttactaagctcctaggggctgaaaggcatcttaaagtccataaacttcctcctgatgcttaagtaccctccacaacatcccacttatgtgtcctgggcttgcacacttctggtgctgatgagctcaccgcctcctgagacaggtgattccttctacagaccactcagactatgagaaacgttcatgccgggtgcagtggctcacacctgtaatcccagcactttgggaggccgaggcgggtggatcacctgaggtcagagtttgagactagcctggcgaacatggtgaaacccgtttctactaaaaaaaaaaaaaaaaaaaaaaaaattagccaagcatggtggcgggcacctgtaatcccagctacttgggaggctgag

SEQ ID NO: 390 - DNA, 402 bp, Homo sapiens
ccaagcatggtggcgggcacctgtaatcccagctacttgggaggctgaggcaggagaatcacttggacctgagaggtggaggttgcagtgagccaagatcacaccactgcactcccgcctggttgacagaatgcgactccatctcaaaaaagaaaagacaaaagaaagttaatatatacctgtattgagctgaaattctgagttctggccctttctctgcggctacccaggcttgtgttttcatctcccacattacctcctattagggactttaatggatgacatattgtcacccagcctcctctgctggatcgggatagctttccatccagacaaagaattttcatgactgagtgaccatccccaggatgggctttggtgtctctcttccctcagaaagtg

SEQ ID NO: 391 - DNA, 402 bp, Homo sapiens
ttcatctcccacattacctcctattagggactttaatggatgacatattgtcacccagcctcctctgctggatcgggatagctttccatccagacaaagaattttcatgactgagtgaccatccccaggatgggctttggtgtctctcttccctcagaaagtgggaagctccaagtgctgccccctgaaacccttttccagttaaccatggcctccaggggtcctggggtgatctcagaaaggtagacagacctctttagcagtaacctggaatattttgctaccttcctgaaatctagagaacagagcaactttgcaagcttcttcaaaggagcccgttctgacccaggtcgatggagctcccaaaatctgcacccccaccccccgctgctgtgtgcaaca

SEQ ID NO: 392 - DNA, 402 bp, Homo sapiens
cccacattacctcctattagggactttaatggatgacatattgtcacccagcctcctctgctggatcgggatagctttccatccagacaaagaattttcatgactgagtgaccatccccaggatgggctttggtgtctctcttccctcagaaagtgggaagctccaagtgctgccccctgaaacccttttccagtaaccactggcctccaggggtcctggggtgatctcagaaaggtagacagacctctttagcagtaacctggaatattttgctaccttcctgaaatctagagaacagagcaactttgcaagcttcttcaaaggagcccgttctgacccaggtcgatggagctcccaaaatctgcacccccaccccccgctgctgtgtgcaacaggagagg

SEQ ID NO: 393 - DNA, 402 bp, Homo sapiens
cctctcagacctcactctgggcaggcccgaactgtcttttccatgccagagggcagtccaggttcctatcagagttatttgaataatcttcccaacacctctgagctgcagtttcttcatgtgtcaaatacagataacaatagtacttcactcataggattggtggacaaagtcagtgaggtaccaggtggaaaaagaggctagaacaagctgggctttgcggcatgccaccgtagtcctagctactcgggaggctgaggtaggaggattgcttgagcctggaagttcaaggctgcagggagctatgatcacaccaatgccctccagcctgggagacagaacgaagccctgtctctaattttttttttttaaagaggttgaaaggtgtctggcacttagtaa

SEQ ID NO: 394 - DNA, 402 bp, Homo sapiens
gcatctagacatttgatatctggctgtttttccctaggaccattgtcatggatggggataggagagccatctaaggtccctgcccatctgcaacactctcctgtttctgctccgatgctctacgatgtcgtacgtggcagagccagcccagcgtggacttcagctctcccagtaactggctgagtgatattagaaaagtcacctgagcctctattttctataaaattaagaaaaatcacactcccttataaaatccttagggaaattaaagatccttgggaaaatagatctcttacaggcatatcttggatacctgatcaatgatagctgctatagtcttcttctgatcatgcttttcataataatcatcttaatcattactggcattcaaagccatgaagc

SEQ ID NO: 395 - DNA, 402 bp, Homo sapiens
tcttggatacctgatcaatgatagctgctatagtcttcttctgatcatgcttttcataataatcatcttaatcattactggcattcaaagccatgaagcacctgggagaaggagaagctgatctgtccatgcctgtctcctttggaaaatgcacgctgttacacttccccacatgttcaaattcatactctctcccccacctcccttttttgagtgcccccaataggcacttgagaaggctgaagctgggattgtaaactgccagatctcctgccttgctctcaccccttgttccaaatcttatcaaatattaaaagctgtgaaatagaggcaggttttaaatcattttaatcacagcattcctcagcctgctcaaaagggctcaaaggaatcgattcagaa

SEQ ID NO: 396 - DNA, 402 bp, Homo sapiens
catactctctcccccacccccttttttgagtgcccccaataggcacttgagaaggctgaagctgggattgtaaactgccagatctcctgccttgctctcaccccttgttccaaatcttatcaaatattaaaagctgtgaaatagaggcaggttttaaatcattttaatcacagcattcctcagcctgctcaaaagggctcagaaggaatcgattcagaagtggtaattatgactgtggccccgtgccaggcggcgggtcagcattggagcaccagcgacagacggccggcactgactggggagggctcctcccaggtggggacaccgaacaggagatgcctcctgggaggaaataaagctaagtcatcccaggctgggtatcaggttttaaaattcataacc

SEQ ID NO: 397 - DNA, 402 bp, Homo sapiens
gcccccaataggcacttgagaaggctgaagctgggattgtaaactgccagatctcctgccttgctctcaccccttgttccaaatcttatcaaatattaaaagctgtgaaatagaggcaggttttaaatcattttaatcacagcattcctcagcctgctcaaaagggctcaaaggaatcgattcagaagtggtaattatgacttgtggccccgtgccaggcggcgggtcagcattggagcaccagcgacagacggccggcactgactggggagggctcctcccaggtggggacaccgaacaggagatgcctcctgggaggaaataaagctaagtcatcccaggctgggtatcaggttttaaaattcataaccaagtcaactgaaaatcagcttacctttatta

SEQ ID NO: 398 - DNA, 402 bp, Homo sapiens
tgccagatctcctgccttgctctcaccccttgttccaaatcttatcaaatattaaaagctgtgaaatagaggcaggttttaaatcattttaatcacagcattcctcagcctgctcaaaagggctcaaaggaatcgattcagaagtggtaattatgactgtggccccgtgccaggcggcgggtcagcattggagcaccagcagacagacggccggcactgactggggagggctcctcccaggtggggacaccgaacaggagatgcctcctgggaggaaataaagctaagtcatcccaggctgggtatcaggttttaaaattcataaccaagtcaactgaaaatcagcttacctttattaagtcccccactaagtgccagatgcttttagcctcatttaaccct

SEQ ID NO: 399 - DNA, 402 bp, Homo sapiens
cgattcagaagtggtaattatgactgtggccccgtgccaggcggcgggtcagcattggagcaccagcgacagacggccggcactgactggggagggctcctcccaggtggggacaccgaacaggagatgcctcctgggaggaaataaagctaagtcatcccaggctgggtatcaggttttaaaattcataaccaagtcaacttgaaaatcagcttacctttattaagtcccccactaagtgccagatgcttttagcctcatttaaccctcagataactcctggaggtatgtgtcattatcctgatttataagtgaggaaactgaggctaaaaaatgataagtagtgtcccaaagccaatcaaaaagtagctcaactagatctatccagcttggaagcctgca

SEQ ID NO: 400 - DNA, 402 bp, Homo sapiens
ccgtgccaggcggcgggtcagcattggagcaccagcgacagacggccggcactgactggggagggctcctcccaggtggggacaccgaacaggagatgcctcctgggaggaaataaagctaagtcatcccaggctgggtatcaggttttaaaattcataaccaagtcaactgaaaatcagcttacctttattaagtccccctactaagtgccagatgcttttagcctcatttaaccctcagataactcctggaggtatgtgtcattatcctgatttataagtgaggaaactgaggctaaaaaatgataagtagtgtcccaaagccaatcaaaaagtagctcaactagatctatccagcttggaagcctgcaatttgttctctgtgttttggtcacgctcaga

SEQ ID NO: 401 - DNA, 402 bp, Homo sapiens
gtgaggaaactgaggctaaaaaatgataagtagtgtcccaaagccaatcaaaaagtagctcaactagatctatccagcttggaagcctgcaatttgttctctgtgttttggtcacgctcagattctgaggactgctgcaaaaatgttgaaggaggtgctacccacaggtcccctgctgtccttctccagcctccaccatcctgcccggtcctcactcactttcctccctcttcccccacattgtcttttggactctggttgactcttgctgtcctctggctactgggattcatccatgcacattagaacccagttaggtcactaaccctttgaccatcacagcccagctgtcatatccctccctagactcatctcttccctggccctttcacctccatgctg

SEQ ID NO: 402 - DNA, 402 bp, Homo sapiens
gctcaactagatctatccagcttggaagcctgcaatttgttctctgtgttttggtcacgctcagattctgaggactgctgcaaaaatgttgaaggaggtgctacccacaggtcccctgctgtccttctccagcctccaccatctgcccggtcctcactcactttcctccctcttcccccacattgtcttttggactctggcttgactcttgctgtcctctggctactgggattcatccatgcacattagaacccagttaggtcactaaccctttgaccatcacagcccagctgtcatatccctccctagactcatctcttccctggccctttcacctccatgctgtatactccagcaagacttagcttcctccagttcctccagcacctttctctcctgcct

SEQ ID NO: 403 - DNA, 402 bp, Homo sapiens
aattgttgggattccttttactggccagactggaggaggacagagagcacgtccatctgactcaccacagtccagggctaagcagggttgccggtacatggcaggcactcagtagacaatggctgagtgagttatgtcaataatgggaccgtgcttaaatgtggacatttctgggggctcagggaataggtcattctgtggtgccagacaaagcatgcaagtgagcagagctggcccttcgcctacaaaataccgaagaatattcttcaatatcacaagaaagtatcttttccatcatttttcttgaaaaatgcatccctcctgatctatctttcatttcctcacatttaatagagatgtgaatacagagaactatatctctactataagacaaatagcacc

SEQ ID NO: 404 - DNA, 402 bp, Homo sapiens
gcagggttgccggtacatggcaggcactcagtagacaatggctgagtgagttatgtcaataatgggaccgtgcttaaatgtggacatttctgggggctcagggaataggtcattctgtgggccagacaaagcatgcaagtgagcagagctggcccttcgcctacaaaataccgaagaatattcttcaatatcacaagaaacgtatcttttccatcatttttcttgaaaaatgcatccctcctgatctatctttcatttcctcacatttaatagagatgtgaatacagagaactatatctctactataagacaaatagcaccctacgcacagtaatgacagcccaagtagtctacttgtaggaacaatgaaaggaagtgatgggggctggggtgaatggaggt

SEQ ID NO: 405 - DNA, 402 bp, Homo sapiens
aaagcatgcaagtgagcagagctggcccttcgcctacaaaataccgaagaatattcttcaatatcacaagaaagtatcttttccatcatttttcttgaaaaatgcatccctcctgatctatctttcatttcctcacatttaatagagatgtgaatacagagaactatatctctactataagacaaatagcaccctacgcactagtaatgacagcccaagtagtctacttgtaggaacaatgaaaggaagtgatgggggctggggtgaatggaggtgcaccgagcctgtctaaagaggctgctgcttctcaacctcagcctggtattgcccaaggaaatgtgaaccagtgcagccagatttcctgacttcaagaggagctggaaatcgactgtatgcgtaatg

SEQ ID NO: 406 - DNA, 402 bp, Homo sapiens
ccctcctgatctatctttcatttcctcacatttaatagagatgtgaatacagagaactatatctctactataagacaaatagcaccctacgcacagtaatgacagcccaagtagtctacttgtaggaacaatgaaaggaagtgatgggggctggggtgaatggaggtgcaccgagcctgtctaaagaggctgctgcttctctaacctcagcctggtattgcccaaggaaatgtgaaccagtgcagccagatttcctgacttcaagaggagctggaaatcgactgtatgcgtaatgtcccaatttttaagagctgcctcaattgaacacgcacaggcacaaacaaaaacaaaataaacaagccaaatgcaacatctgctgagaggttttggttcttggattgc

SEQ ID NO: 407 - DNA, 402 bp, Homo sapiens
acgcacagtaatgacagcccaagtagtctacttgtaggaacaatgaaaggaagtgatgggggctggggtgaatggaggtgcaccgagcctgtctaaagaggctgctgcttctcaacctcagcctggtattgcccaaggaaatgtgaaccagtgcagccagatttcctgacttcaagaggagctggaaatcgactgtatgcagtaatgtcccaatttttaagagctgcctcaattgaacacgcacaggcacaaacaaaaacaaaataaacaagccaaatgcaacatctgctgagaggttttggttcttggattgcaacctctgcacacattttcccactaaataaagaaaagctccttgcagatggaccccggtgggacctccaatacccggaatgcaccgaa

SEQ ID NO: 408 - DNA, 402 bp, Homo sapiens
aaatcgactgtatgcgtaatgtcccaatttttaagagctgcctcaattgaacacgcacaggcacaaacaaaaacaaaataaacaagccaaatgcaacatctgctgagaggttttggttcttggattgcaacctctgcacacattttcccactaaataaagaaaagctccttgcagatggaccccggtgggacctccaatacgccggaatgcaccgaatggctgggatttgtgtggccccaaaaccctcccttcttgcgctcacagtgctttcttgaagcttcagcaaaccccagcgccaaaggaaaaatatttataacctgactaggcagcgcttaaaagatcaaggcatacgtggtgtgcagaaatcactcgcacattgttcctgtttcctctctgccata

SEQ ID NO: 409 - DNA, 402 bp, Homo sapiens
gcgtaatgtcccaatttttaagagctgcctcaattgaacacgcacaggcacaaacaaaaacaaaataaacaagccaaatgcaacatctgctgagaggttttggttcttggattgcaacctctgcacacattttcccactaaataaagaaaagctccttgcagatggaccccggtgggacctccaatacccggaatgcaccagaatggctgggatttgtgtggccccaaaaccctcccttcttgcgctcacagtgctttcttgaagcttcagcaaaccccagcgccaaaggaaaaatatttataacctgactaggcagcgcttaaaagatcaaggcatacgtggtgtgcagaaatcactcgcacattgttcctgtttcctctctgccataggatcaaatgctt

SEQ ID NO: 410 - DNA, 402 bp, Homo sapiens
tacccggaatgcaccgaatggctgggatttgtgtggccccaaaaccctcccttcttgcgctcacagtgctttcttgaagcttcagcaaaccccagcgccaaaggaaaaatatttataacctgactaggcagcgcttaaaagatcaaggcatacgtggtgtgcagaaatcactcgcacattgttcctgtttcctctctgccagtaggatcaaatgcttccagtttcaatgattaatcgcctctcagttttcaccacaagttgtacaatgttattgactgaaacagaaatattcatttcaggactctgctgctggaacaaacacaagctctggggcggggctgatgatgactgatggcacaggttgctgcacatgtttctgtgctatcggattcaaaccacccc

SEQ ID NO: 411 - DNA, 402 bp, Homo sapiens
aaatatttataacctgactaggcagcgcttaaaagatcaaggcatacgtggtgtgcagaaatcactcgcacattgttcctgtttcctctctgccataggatcaaatgcttccagtttcaatgattaatcgcctctcagttttcaccacaagttgtacaatgttattgactgaaacagaaatattcatttcaggactctgcctgctggaacaaacacaagctctggggcggggctgatgatgactgatggcacaggttgctgcacatgtttctgtgctatcggattcaaaccacccctgagactgctctctttacagatgggactcagggaagctcaaacaactatccaacaacaatcatttagtgtgactttattaatggccactatccatggaatgtttac

SEQ ID NO: 412 - DNA, 402 bp, Homo sapiens
tgactaggcagcgcttaaaagatcaaggcatacgtggtgtgcagaaatcactcgcacattgttcctgtttcctctctgccataggatcaaatgcttccagtttcaatgattaatcgcctctcagttttcaccacaagttgtacaatgttattgactgaaacagaaatattcatttcaggactctgctgctggaacaaacaacaagctctggggcggggctgatgatgactgatggcacaggttgctgcacatgtttctgtgctatcggattcaaaccacccctgagactgctctctttacagatgggactcagggaagctcaaacaactatccaacaacaatcatttagtgtgactttattaatggccactatccatggaatgtttactctattccggatac

SEQ ID NO: 413 - DNA, 402 bp, Homo sapiens
tttgggaaggagccttggcagtaacattttatacttgaaataactgaggcagagaagcccaaggctgctaagcagcagagcagaggggccagtccccagcccagagctcccacctcggctctggcattgctctcctatgcaagaccctgacacagacacacacagtcttttccaagctggctgggcaaggaacaatttctctttgcagaaactcgagttactacaaggcttctgtggacagtctagggtaatattggtactttaattatgcacctggtgtgttatctatccttgggagttgggaaaggtgatgctctggcggtctggggaaatctgccctctgaaattcgagcactcttgaatctcttgcctggggcccaattgagcatggttgctctccag

SEQ ID NO: 414 - DNA, 402 bp, Homo sapiens
gctgggcaaggaacaatttcttttgcagaaactcgagttactacaaggcttctgtggacagtctagggtaatattggtactttaattatgcacctggtgtgttatctatccttgggagttgggaaaggtgatgctctggcggtctggggaaatctgccctctgaaattcgagcactcttgaatctcttgcctggggcccaagttgagcatggttgctctccaggaatgtcccagggcagtgcctctctaactcaaatcctgggagatattctccagcgtctatgaattctccaggtaacctctttacaaaatttaaaatttttcatcaaataataatcatgtaaacatcaatttactattttaggttgtctgttttaatcaccttataaccatctatgttgg

SEQ ID NO: 415 - DNA, 402 bp, Homo sapiens
gcttctgtggacagtctagggtaatattggtactttaattatgcacctggtgtgttatctatccttgggagttgggaaaggtgatgctctggcggtctggggaaatctgccctctgaaattcgagcactcttgaatctcttgcctggggcccaattgagcatggttgctctccaggaatgtcccagggcagtgcctctctagactcaaatcctgggagatattctccagcgtctatgaattctccaggtaacctctttacaaaatttaaaatttttcatcaaataataatcatgtaaacatcaatttactattttaggttgtctgttttaatcaccttataaccatctatgttgggggtccacaaactacagcctgtgaactaaatcagcttccaacctgtt

SEQ ID NO: 416 - DNA, 402 bp, Homo sapiens
tgtgttatctatccttgggagttgggaaaggtgatgctctggcggtctggggaaatctgccctctgaaattcgagcactcttgaatctcttgcctggggcccaattgagcatggttgctctccaggaatgtcccagggcagtgcctctctaactcaaatcctgggagatattctccagcgtctatgaattctccaggtaactctctttacaaaatttaaaatttttcatcaaataataatcatgtaaacatcaatttactattttaggttgtctgttttaatcaccttataaccatctatgttgggggtccacaaactacagcctgtgaactaaatcagcttccaacctgttattctaaggtctactactgaagaatggcttcatggtcttaacccattgag

SEQ ID NO: 417 - DNA, 402 bp, Homo sapiens
ccttataaccatctatgttgggggtccacaaactacagcctgtgaactaaatcagcttccaacctgttattctaaggtctactactgaagaatggcttcatggtcttaacccattgagaaaaaaaaaatcaaaagaaaaataatatttcatgacacttgaaaagtatatgaagtttaaatttcagtgtccataaataaagcttgtattgagacagcagttctcattcatctgtagctgcctttgcaaaaaagacagtggagttgagtcattggaacagagaccttatggcccatagagccataaatatttactatatgggccaagacagaaagttggacaattcctgacctatgcaatgtgatgttagtggcttatgtttgtgcttccagctgagttgggta

SEQ ID NO: 418 - DNA, 402 bp, Homo sapiens
tataaccatctatgttgggggtccacaaactacagcctgtgaactaaatcagcttccaacctgttattctaaggtctactactgaagaatggcttcatggtcttaacccattgagaaaaaaaaaatcaaaagaaaaataatatttcatgacacttgaaaagtatatgaagtttaaatttcagtgtccataaataaagttgctattgagacagcagttctcattcatctgtagctgcctttgcaaaaaagacagtggagttgagtcattggaacagagaccttatggcccatagagccataaatatttactatatgggccaagacagaaagttggacaattcctgacctatgcaatgtgatgttagtggcttatgtttgtgcttccagctgagttgggtactc

SEQ ID NO: 419 - DNA, 402 bp, Homo sapiens
tccaacctgttattctaaggtctactactgaagaatggcttcatggtcttaacccattgagaaaaaaaaaatcaaaagaaaaataatatttcatgacacttgaaaagtatatgaagtttaaatttcagtgtccataaataaagttgtattgagacagcagttctcattcatctgtagctgcctttgcaaaaaagacagtggtagttgagtcattggaacagagaccttatggcccatagagccataaatatttactatatgggccaagacagaaagttggacaattcctgacctatgcaatgtgatgttagtggcttatgtttgtgcttccagctgagttgggtactctgtctgttgtggttttgttcaagttcttggattgcaacctctgcataaattttc

SEQ ID NO: 420 - DNA, 402 bp, Homo sapiens
ttcatctgtagctgcctttgcaaaaaagacagtggagttgagtcattggaacagagaccttatggcccatagagccataaatatttactatatgggccaagacagaaagttggacaattcctgacctatgcaatgtgatgttagtggcttatgtttgtgcttccagctgagttgggtactctgtctgttgtggttttgttctaagttcttggattgcaacctctgcataaattttcctgctaaatagagaaaaactccttgcagagggacccaagtgggacccccgatacccagaatgcaccaaatagctgggttttttacttttattgccatagggctaatgagaaaaataaaaatagaggaggactcaggcacttagaacatttgcagctacagaaagca

SEQ ID NO: 421 - DNA, 402 bp, Homo sapiens
tattgtctacaggttctttgatattgcaactttattaagtgaaaagacatataaagaaaccaatttgaccagaagctaattgaaagaaatgagttaagttccttgggcatatttctgggcacaaaaacatcaccaaacttctaaataaagacccaaaacacttgtaacactaagcattaaaataaatatgagctatacatcgcatttaagaaagattaagcaaaacaagtcagataattatttacccaagtttggtgaattagcgagtgccagcagtcatagtggtggtctgttggatcaaggaataaatgtttgaaagcaaaagttgtcaggagcacctcctcctaccacacagttcaaaaacaattacagatatggcaggctcgccaagcacttccatac

SEQ ID NO: 422 - DNA, 402 bp, Homo sapiens
cacaaaaacatcaccaaacttctaaataaagacccaaaacacttgtaacactaagcattaaaataaatatgagctatacatgcatttaagaaagattaagcaaaacaagtcagataattatttacccaagtttggtgaattagcgagtgccagcagtcatagtggtggtctgttggatcaaggaataaatgtttgaaagcagaaagttgtcaggagcacctcctcctaccacacagttcaaaaacaattacagatatggcaggctcgccaagcacttccataccacatggtttattgccttgcatttgtacgattatcttctgctttacaaatttttattttacaattacttttattcattgactgattcattttccaatccacttattccagttcagggtc

SEQ ID NO: 423 - DNA, 402 bp, Homo sapiens
aacaattacagatatggcaggctcgccaagcacttccataccacatggtttattgccttgcatttgtacgattatcttctgctttacaaatttttattttacaattacttttattcattgactgattcattttccaatccacttattccagttcagggtcacaggtggttggagcccatcccagcagctcagggtgccagagaaggaacccaccctggccaggacgccatcccatggcagggcacactcacacacacctacatactcacactgggaccacaccagttcacttcacatgcacagctctgggacgtgggaggaaactggagtccctggagaacacccgtgcagacatgggggaaacgtgccgattccacacagacagtggctctgccagggttt

SEQ ID NO: 424 - DNA, 402 bp, Homo sapiens
ttaaactaatgttgttaatttgaagtttattggttttgcagtcgtatttgtgtttaatttggaaatttgtttcagttttatagctgaataagagctaaaaagcataaggattttatacctaagttttatgtctgtacatattaagtaacattatggtaaagtcaacacttactgaaaatgtcccctttaatagggcatatagttacttaagtttaagcaggaaaaatgggtttaagaaataccaattgtattatatctttaaatatgtgtgagctgttcaaagttgccacctggcagaaaattcaatctcagttacatagggaagttcctacccctttctaggaaagggtcttgttaaataagaattctaagcttaagttggagacaggttcttgggttggg

SEQ ID NO: 425 - DNA, 402 bp, Homo sapiens
ttaagaaataccaattgtattatatctttaaatatgtgtgagctgttcaaagttgccacctggcagaaaattcaatctcagttacatagggaagttcctacccctttctaggaaagggtcttgttaaataagaattctaagcttaagttggagacaggttcttgggttggggcagtgatcattttttaatcttgcttgtactgcctacactgcttttgtgtgtgctgatctgtccatcctttaggctgtgctctgcagaatggctcaaaatcacccctcacttagtcctcccacttgcttcctttgtaccccctcagcccactttgcttcttcctctttcctggacaaagggagcacagttgttctcaacgggcctttagaagcaaaattctggcttgactt

SEQ ID NO: 426 - DNA, 402 bp, Homo sapiens
cctcacttagtcctcccacttgcttcctttgtaccccctcagcccactttgcttcttcctctttcctggacaaagggagcacagttgttctcaacgggcctttagaagcaaaattctggcttgactttccaatgtgggagtgggagaggactgctaaaaataattggtctttcttcttagcaattcaccttattacaactagttaggtggaaaacttttttttcgttttactgaaaagtttaacccaggcactgaagagttagattgtatggacctcttttaatcatctgctgagttctccaatgtatcagttagctattgctgtgtaacaaatcaccccaaacgcaatgctctacaacaataaaaatcatttattctgctcactgcctgcagtttattcag

SEQ ID NO: 427 - DNA, 402 bp, Homo sapiens
tcagggctgccaaatggataccggctatcagttgaaagctataagcaggggcactctgcataagcatggctcatctctacaaaagctcctccccagtctccttgtttgggcctcacagtgtatggtaacctcagggcagtcagaatgtgacaactaaagacttcaggagtaagtattccaggaagcaagatataagctatagtggccttctaagacctagcctcagaggtcacatagtgtaacctctatcacaccctattggtagatattgtaacagaagcccacccagtttcacagatggggacatagactccatttcttaataggtaactggccagagttgtaaaagagcatgtgggatggaagatattgttgcaagcatctttagcaaatacaactgga

SEQ ID NO: 428 - DNA, 402 bp, Homo sapiens
tgccccctttgaagtatttctgctgagaaaatagtttctgtgtatttgtaaatttacaggttgaacatagatcattattcaagcattgctggtcgattcgtcttttcaaaggcgggagctgctggctgtgggaagggacccagcaggggtctcttgcaaccctgctctatgggtgggggaaatctggacctccctctggtaggggttgattgaagtgaagggtcaccatatgtctttcccaagagggtgactgacttcctgctttggtcccagtttccctgagattttcctgaaagcccttccggctagcccagttgggagtgttagtacatcagatcccatgctttggtgaaaaatgtaaacacagacctgatttttcattttaaatgaagccaagcatat

SEQ ID NO: 429 - DNA, 402 bp, Homo sapiens
aggggcaataatgttttcatttgattaaaaaaggttaaagaaacaaagaaacagtgttttctcaggtgctctaagtaattctgttaatgaattttcggagacagcgtgtgaatttgaaaagagtaggactttttaaagagttcatactatgaacccaataattcagatcctagggccttatcctaaggacataatagaaactgagcacatttataagaacaaagatgttcaatgaagtgttacttacaacagcaaaaaaacttgaaagtcacctaaatgtttgtaagtcaagagcttcattgatattgactgcaaagtccatgttattccatgtgacgaattttttaatcaatcacctcttgatggattttaaattttttacaattttttgctatcctaaaa

SEQ ID NO: 430 - DNA, 402 bp, Homo sapiens
gaaaggctacacacagggatctctgagtgccatggttcagagatcattgaatgaggtgagattcaaagagtctgagaaagtgcctgatagaagaggatggttggctctggagggacagaagtggagggtgggagtgggggaactggccttgcctgagtgtatccaaagagcaaatctttctcactgggctgactgacctcagagaacaggcctatggcccttgtgtttcttcactgccatcagaaagactgtgcacatgaggagatggaagggactctcaaaagagagaggggatcatcagggatgagatccgtggagaatcaccgcagagctggcagcgtttatctaagaatgtggcattgggaaaagtggtgcaggctacattccaggcgataaggacca

SEQ ID NO: 431 - DNA, 402 bp, Homo sapiens
gggacagaagtggagggtgggagtgggggaactggccttgcctgagtgtatccaaagagcaaatctttctcactgggctgactgacctcgagaacaggcctatggcccttgtgtttcttcactgccatcagaaagactgtgcacatgaggagatggaagggactctcaaaagagagaggggatcatcagggatgagatccagtggagaatcaccgcagagctggcagcgtttatctaagaatgtggcattgggaaaagtggtgcaggctacattccaggcgataaggaccaagcaatgaaataacaaataagtcatcttaaagttaaaggagatggacaatagacaaacaaatatgtttcaaaacatgataaatgctatggaagaaataaagagggttggag

SEQ ID NO: 432 - DNA, 402 bp, Homo sapiens
taccttcctatgtacaatccactttctcttaaagtcacagcagcctcagaatgtattacatacataagaactagtcctacatctagatgtaatggctttcaaacctttatgagcataggaaacacctgttgagctggtttagaatatagcatttagggccttgcctccagatagtctgatttcacagaaacctgcattttataaaaaatcaccccaaatagttatgatgaaggtgatctatgtacgacacttagagaatcagtgatggaaaattcaccaagaacagccacaggcaggccagaagaatggccctgcccctctacttttaggattaagcagaagctggccctagatctcaccagttaccagtgatcttgggcatttttagcatcatgtgcattg

SEQ ID NO: 433 - DNA, 402 bp, Homo sapiens
ttgccttaaatcagctcttaaatgccctgggatgaacagccctaaataggaaagaaaaaaaaaaaacaagtttcttgcaagttcacagatatgcttggtgctttctgtcaggctagggtgtagccttctctgttctaaatttgattttctgagtctttaaggaaaaatggctactggtcccctggacgctgattgcttcaagcatctgaatctgctccatcacttctacctccacccactggtccacgtccagtgggtagaggtaaaggggatggagatatcatttatcttcaaaggataaaactgctctgagagatctttgctttcttagaaacactgctggaaagttgtttctttagactacattaacagaagtaccatctctaggaagacaaggtggta

SEQ ID NO: 434 - DNA, 402 bp, Homo sapiens
caggctagggtgtagccttctctgttctaaatttgattttctgagtctttaaggaaaaatggctactggtcccctggacgctgattgcttcagcatctgaatctgctccatcacttctacctccacccactggtccacgtccagtgggtagaggtaaaggggatggagatatcatttatcttcaaaggataaaactgctcctgagagatctttgctttcttagaaacactgctggaaagttgtttctttagactacattaacagaagtaccatctctaggaagacaaggtggtaataactaacatcaaatgagcagttcctatgtaccctgtacatgtcttagccaacttcatccttgtaacaaacctggaaggcaggcactgttatcactcttattcccag

SEQ ID NO: 435 - DNA, 402 bp, Homo sapiens
actggtccacgtccagtgggtagaggtaaaggggatggagatatcatttatcttcaaaggataaaactgctctgagagatctttgctttcttagaaacactgctggaaagttgtttctttagactacattaacagaagtaccatctctaggaagacaaggtggtaataactaacatcaaatgagcagttcctatgtacccctgtacatgtcttagccaacttcatccttgtaacaaacctggaaggcaggcactgttatcactcttattcccaggtgaaccagttgaggttccaagaagtcttttgtgcaaggtcatgcagagttgaggcccccaagtcggtagacttcaggagccagaccctcaaccccctcactgcctcccgcctcatgctgcactgagc

SEQ ID NO: 436 - DNA, 402 bp, Homo sapiens
tctctaggaagacaaggtggtaataactaacatcaaatgagcagttcctatgtaccctgtacatgtcttagccaacttcatccttgtaacaaacctggaaggcaggcactgttatcactcttattcccaggtgaaccagttgaggttccaagaagtcttttgtgcaaggtcatgcagagttgaggcccccaagtcggtagagcttcaggagccagaccctcaaccccctcactgcctcccgcctcatgctgcactgagcagaccatacccggatggtcatgttcaggttggctatcaatgcagaccacgctgggcatattcaggggacggatactcagaactatataacataaggaatagaggaaggactggaggatgtattaacatgaagaaaaggtagac

SEQ ID NO: 437 - DNA, 402 bp, Homo sapiens
ccttgataaacctaaaggtaggtattattcctcccagatgctgtcttcttagcctgggatgcaaaagccataggatcacttcacgtccaacccccatcaggtgatctgtcatgaatcacaagttattggagccagatggaactacagagctaaaagatacatgaagacaccgaggcctgcagacagggactaactttccaatggtcacagagctaacaagtgtcagagtcaggctagacccaggactcacaagttgagctcacaattagttccacttcctacaccacctggatcatgagtgtcaagaatgaaggacctttggcagtcttctcatccagcagtgacaaacaggatgcacttcatgtgccagcttttaattcattggtcatggtttcctgaagt

SEQ ID NO: 438 - DNA, 402 bp, Homo sapiens
ctgaggccatatctggatccagtggacatgagtgaatcatttatgatgtctgctttggacacaggtggggaagtgacaacctgtgtaccaagggtttggcagccttgagctaatccatcttaatgactttctgcacatgctgcctggaagtgatattaatattgcaaaagagattataatgtgtgataacgttgtagtaccgtcacttattaaaataattcaaggatccatctttgatggttaaacccactgtctatgtctgtttgtgttcctacaaaggagaacccaaggctgagtaatttgtaaagaagaggtttatttggctcacagttctacagactgtcaagaagcatggatccagtgtctgcatctggtgtggacctcaggctgcttccattcatg

SEQ ID NO: 439 - DNA, 402 bp, Homo sapiens
tccttcttcatggagtttcccaaagtacacacccacagtcctacaaattggggaagagccagaggcaataaatgtgtgggagcagtcagctgagaactggatgttgaaggattgtacattttcttgaattacatgggagcaaactgcctcctgagcctgctgtacccaaatttatcaaagcacaaagcatttttaaagacctatttaataaactgattaaatgtatttgacaacggagctagaaagccagtcaattcatgtcttcatcactcctgagaagttgcctacacgataaaaatggaagttctctgaatctgtgggtgggagggctttcactctcctaatggaggagggaaaaccagggcatgctgggaggccgtcccagcccatcttcctgacatc

SEQ ID NO: 440 - DNA, 402 bp, Homo sapiens
ggaggccgtcccagcccatcttcctgacatcgctgcttttcctgtactgtgctaagtgcagagaaggtccagcgccctgcctgtttttcacttgcattcttgtctccagactttctttctctccccacccttctcatgaccactagcatctaagtttatcgcttcctctctgttacctctgtatcctccaagtacatgatattacctctacagctcatctgccaatgctgcaaagtttacttatttataaccttcccagtgccttgtgtatattagatgcaggagtaagatgttgtgatcgagatcgtggtggtgatgatgatgatggggagggagaggaagaggagggggagaagattaggcaagaatgtaaaagccctcatgggtcttggaaatcacagc

SEQ ID NO: 441 - DNA, 402 bp, Homo sapiens
tcgctgcttttcctgtactgtgctaagtgcagagaaggtccagcgccctgcctgtttttcacttgcattcttgtctccagactttctttctctccccacccttctcatgaccactagcatctaagtttatcgcttcctctctgttacctctgtatcctccaagtacatgatatacctctacagctcatctgccaatgctgctaaagtttacttatttataaccttcccagtgccttgtgtatattagatgcaggagtaagatgttgtgatcgagatcgtggtggtgatgatgatgatggggagggagaggaagaggagggggagaagattaggcaagaatgtaaaagccctcatgggtcttggaaatcacagcatctaagttctctccttcctctcccctcc

SEQ ID NO: 442 - DNA, 402 bp, Homo sapiens
gtccagcgccctgcctgtttttcacttgcattcttgtctccagactttctttctctccccacccttctcatgaccactagcatctaagtttatcgcttcctctctgttacctctgtatcctccaagtacatgatatacctctacagctcatctgccaatgctgcaaagtttacttatttataaccttcccagtgccttgtagtatattagatgcaggagtaagatgttgtgatcgagatcgtggtggtgatgatgatgatggggagggagaggaagaggagggggagaagattaggcaagaatgtaaaagccctcatgggtcttggaaatcacagcatctaagttctctccttcctctcccctccttcccctggtttagagatgctttagctagcctaaggg

SEQ ID NO: 443 - DNA, 402 bp, Homo sapiens
gatcttcagagtttaggctcttgaggctcaataaacttaaaatcttttctcagctttcctgttagatcacccacccccgaggcaatgaatgctgctgagctgatggaaaaagggcggtgagaaactccagaaatattttccggcagtgtttcttctttatctctgtcccccagtagctcagtgaggtaaagataatcatcaggtttttaattttttatgttattattgtggctgcataacagttgtacatatttatggggttcatgtgatactttgataccagcatgtaatgtgtaatgatcacatcaggtcgttattttaacactgaggatatggatgctcagaatggacattggcctcactgaggtaatgcaggggtaaatggaggcactggatggggct

SEQ ID NO: 444 - DNA, 402 bp, Homo sapiens
gggcggtgagaaactccagaaatattttccggcagtgtttcttctttatctctgtcccccagtagctcagtgaggtaaagataatcatcagtttttaattttttatgttattattgtggctgcataacagttgtacatatttatggggttcatgtgatactttgataccagcatgtaatgtgtaatgatcacatcaggtcagttattttaacactgaggatatggatgctcagaatggacattggcctcactgaggtaatgcaggggtaaatggaggcactggatggggctggaacccccatctgtctgactcaactacctgaagatggaatatgggttgtgctaactaaattaatgagtagaggctgcctgaggcgctgccttgagaacagttctgaggct

SEQ ID NO: 445 - DNA, 402 bp, Homo sapiens
gagggtcgtgaaaggtttgggctcagaggaataagtaagaaaagctgcatttaacaccaggaatctggcagggacacgtagagtcaaggagacagaaagaccagcttggagagtggttgagtctgcacgaggcgtggaggggtgcccagcccccggcagaggcaggtcacagtgacaaggacagaaagcctggagggacaagctccggggacttagtggctggcagaggggactcttttccccagtgactcatatgctcctttttttctagctgaatttcagttttattttcagctccaatcagtggcaatagaggaatccgtgtgctttatttctcctgctccacattcctccccacagtctcccagaggctaacattctcccatcctccaaagagaagaa

SEQ ID NO: 446 - DNA, 402 bp, Homo sapiens
tgaaaggtttgggctcagaggaataagtaagaaaagctgcatttaacaccaggaatctggcagggacacgtagagtcaaggagacagaaagaccagcttggagagtggttgagtctgcacgaggcgtggaggggtgcccagcccccggcagaggcaggtcacagtgacaaggacagaaagcctggagggacaactccggggtacttagtggctggcagaggggactcttttccccagtgactcatatgctcctttttttctagctgaatttcagttttattttcagctccaatcagtggcaatagaggaatccgtgtgctttatttctcctgctccacattcctccccacagtctcccagaggctaacattctcccatcctccaaagagaagaaatccacag

SEQ ID NO: 447 - DNA, 402 bp, Homo sapiens
caggaatctggcagggacacgtagagtcaaggagacagaaagaccagcttggagagtggttgagtctgcacgaggcgtggaggggtgcccagcccccggcagaggcaggtcacagtgacaaggacagaaagcctggagggacaactccggggacttagtggctggcagaggggactcttttccccagtgactcatatgctctctttttttctagctgaatttcagttttattttcagctccaatcagtggcaatagaggaatccgtgtgctttatttctcctgctccacattcctccccacagtctcccagaggctaacattctcccatcctccaaagagaagaaatccacagcccagagcagagcaggcctggtggcttcatgacagtcatcagtgtggcc

SEQ ID NO: 448 - DNA, 402 bp, Homo sapiens
gtgactcatatgctcctttttttctagctgaatttcagttttattttcagctccaatcagtggcaatagaggaatccgtgtgctttatttctcctgctccacattcctccccacagtctcccagaggctaacattctcccatcctccaaagagaagaaatccacagcccagagcagagcaggcctggtggcttcatgacacgtcatcagtgtggccccatctactagtgctctccaagtccagcaatgtgttaaccctttacaggcattatcccatgtaacccctaacagccctaggaagtagacactactagtacctataattcacaggtaagaaaactgaggttcagaaaggcaaagtaactggttgagggtcacacagctaagaagtcgcaaagccaga

SEQ ID NO: 449 - DNA, 402 bp, Homo sapiens
agtggcaatagaggaatccgtgtgctttatttctcctgctccacattcctccccacagtctcccagaggctaacattctcccatcctccaaagagaagaaatccacagcccagagcagagcaggcctggtggcttcatgacagtcatcagtgtggccccatctactagtgctctccaagtccagcaatgtgttaacccttctacaggcattatcccatgtaacccctaacagccctaggaagtagacactactagtacctataattcacaggtaagaaaactgaggttcagaaaggcaaagtaactggttgagggtcacacagctaagaagtcgcaaagccagagtcgaaaatattcaaaaccaaaaagaaaaaaaagaaaaaaaaatctgagttgaaagct

SEQ ID NO: 450 - DNA, 402 bp, Homo sapiens
cttcatgacagtcatcagtgtggccccatctactagtgctctccaagtccagcaatgtgttaaccctttacaggcattatcccatgtaacccctaacagccctaggaagtagacactactagtacctataattcacaggtaagaaaactgaggttcagaaaggcaaagtaactggttgagggtcacacagctaagaagtcagcaaagccagagtcgaaaatattcaaaaccaaaaagaaaaaaaagaaaaaaaaatctgagttgaaagcttgctctcttaacgatatagctctggcccaattaagctataaaatgtcacaggtagcagtgtccttagagaacacctaagctgagaactccctcatttttcagagggggggatctgagggtcagtgaggagat

SEQ ID NO: 451 - DNA, 402 bp, Homo sapiens
ggttgagggtcacacagctaagaagtcgcaaagccagagtcgaaaatattcaaaaccaaaaagaaaaaaaagaaaaaaaaatctgagttgaaagcttgctctcttaacgatatagctctggcccaattaagctataaaatgtcacaggtagcagtgtccttagagaacacctaagctgagaactccctcatttttcagagaggggggatctgagggtcagtgaggagatctgttttgtccagggtcatcagtgagttaggggatgagccgggacttgaaccctacagtggaagaaatgtgagccacagaacttaccatgttgcttgttgacttcctctggcacattccactgtattttccccgaagcctctccccagcctctcagccccactcctcgtggct

SEQ ID NO: 452 - DNA, 402 bp, Homo sapiens
ttttccccgaagcctctccccagcctctcagccccactcctcgtggctccactccctattactcagaggtgttcagctccacccactagtctcccagcatggcagtttctgcccattacaggcctacaatacctgcgagcctgtcagccccctgcctcccacctctcaccccccgccccggaaatggttctgttgttaccaggaccaatcagggcacccagcagcgtctagaacttggggctgataatggcatcgtgaatagaggaaattagagctgaatgcattcacagtgaatattcctcccagggcagacggggccattcgctgagtggcacatgacagatgttcacatggaacccagtcgcagggccaccttcactcctttcaccagcacggctgtct

SEQ ID NO: 453 - DNA, 402 bp, Homo sapiens
ctctcaagcacatggccttggccctgaagagcgtagtggttgatcgcacagcctttggggttagatgtatctgcttccaagtcccaaccttctgcctcactgctgggcaggccgggcaacatgcctgaatctcagtgcccccatctgtaaaatggggataattaatacccaccccacagtggtcatgtgaattcaatgtgagttatgagtgtaaagagtttgtccccatgcctggtatacagcaggtgttcaataaacgatggctattatgatcatcgattgctctctgtcacctgtgtatcctccaaatgcatgactggcctctgcaattcatctgcctcaaagtttacttctttgtaaccttcccagtaccttgcatatattaggtgcaggattaaggtg

SEQ ID NO: 454 - DNA, 402 bp, Homo sapiens
gccctgaagagcgtagtggttgatcgcacagcctttggggttagatgtatctgcttccaagtcccaaccttctgcctcactgctgggcaggccgggcaacatgcctgaatctcagtgcccccatctgtaaaatggggataattaatacccaccccacagtggtcatgtgaattcaatgtgattatgagtgtaaagagtttgttccccatgcctggtatacagcaggtgttcaataaacgatggctattatgatcatcgattgctctctgtcacctgtgtatcctccaaatgcatgactggcctctgcaattcatctgcctcaaagtttacttctttgtaaccttcccagtaccttgcatatattaggtgcaggattaaggtgttgtgattgagatgatggtg

SEQ ID NO: 455 - DNA, 402 bp, Homo sapiens
ttgatcgcacagcctttggggttagatgtatctgcttccaagtcccaaccttctgcctcactgctgggcaggccgggcaacatgcctgaatctcagtgcccccatctgtaaaatggggataattaatacccaccccacagtggtcatgtgaattcaatgtgattatgagtgtaaagagtttgtccccatgcctggtatacaggcaggtgttcaataaacgatggctattatgatcatcgattgctctctgtcacctgtgtatcctccaaatgcatgactggcctctgcaattcatctgcctcaaagtttacttctttgtaaccttcccagtaccttgcatatattaggtgcaggattaaggtgttgtgattgagatgatggtgacgatgatgatgaagatgc

SEQ ID NO: 456 - DNA, 402 bp, Homo sapiens
gcttccaagtcccaaccttctgcctcactgctgggcaggccgggcaacatgcctgaatctcagtgcccccatctgtaaaatggggataattaatacccaccccacagtggtcatgtgaattcaatgtgattatgagtgtaaagagtttgtccccatgcctggtatacagcaggtgttcaataaacgatggctattatgatctatcgattgctctctgtcacctgtgtatcctccaaatgcatgactggcctctgcaattcatctgcctcaaagtttacttctttgtaaccttcccagtaccttgcatatattaggtgcaggattaaggtgttgtgattgagatgatggtgacgatgatgatgaagatgctgatggggatgcagaggagggggagaagattag

SEQ ID NO: 457 - DNA, 402 bp, Homo sapiens
ggcaggccgggcaacatgcctgaatctcagtgcccccatctgtaaaatggggataattaatacccaccccacagtggtcatgtgaattcaatgtgattatgagtgtaaagagtttgtccccatgcctggtatacagcaggtgttcaataaacgatggctattatgatcatcgattgctctctgtcacctgtgtatcctccagaatgcatgactggcctctgcaattcatctgcctcaaagtttacttctttgtaaccttcccagtaccttgcatatattaggtgcaggattaaggtgttgtgattgagatgatggtgacgatgatgatgaagatgctgatggggatgcagaggagggggagaagattaggcaagaatgtaaaagccctcatgggtcttagaa

SEQ ID NO: 458 - DNA, 402 bp, Homo sapiens
gcaacatgcctgaatctcagtgcccccatctgtaaaatggggataattaatacccaccccacagtggtcatgtgaattcaatgtgattatgagtgtaaagagtttgtccccatgcctggtatacagcaggtgttcaataaacgatggctattatgatcatcgattgctctctgtcacctgtgtatcctccaaatgcatgacttggcctctgcaattcatctgcctcaaagtttacttctttgtaaccttcccagtaccttgcatatattaggtgcaggattaaggtgttgtgattgagatgatggtgacgatgatgatgaagatgctgatggggatgcagaggagggggagaagattaggcaagaatgtaaaagccctcatgggtcttagaaatcacaagag

SEQ ID NO: 459 - DNA, 402 bp, Homo sapiens
gtgtatcctccaaatgcatgactggcctctgcaattcatctgcctcaaagtttacttctttgtaaccttcccagtaccttgcatatattaggtgcaggattaaggtgttgtgattgagatgatggtgacgatgatgatgaagatgctgatggggatgcagaggagggggagaagattaggcaagaatgtaaaagccctcactgggtcttagaaatcacaagagggcaatttgttgcagcagaaattgaattacctttggagttatacagatgtgctgaaatttactgtcagcaacaggaaactcacacaccctgccgggtccatgccacattgttctgtgtggctggggaaagttacctcatctctctgagtctgggtctcagtccctcatcttctccaggg

SEQ ID NO: 460 - DNA, 402 bp, Homo sapiens
attaggtgcaggattaaggtgttgtgattgagatgatggtgacgatgatgatgaagatgctgatggggatgcagaggagggggagaagattaggcaagaatgtaaaagccctcatgggtcttagaaatcacaagagggcaatttgttgcagcagaaattgaattacctttggagttatacagatgtgctgaaatttactgctcagcaacaggaaactcacacaccctgccgggtccatgccacattgttctgtgtggctggggaaagttacctcatctctctgagtctgggtctcagtccctcatcttctccagggctgttgttaggagtgaatgaagccatgctcacaaagtgcttagcacagtacttggcctagtgggtgttcgattcacagtggatatt

SEQ ID NO: 461 - DNA, 402 bp, Homo sapiens
ctttggagttatacagatgtgctgaaatttactgtcagcaacaggaaactcacacaccctgccgggtccatgccacattgttctgtgtggctggggaaagttacctcatctctctgagtctgggtctcagtccctcatcttctccagggctgttgttaggagtgaatgaagccatgctcacaaagtgcttagcacagtaccttggcctagtgggtgttcgattcacagtggatattgctgttgctactcttgtcagtatatttctgatctccccaacttacagatcaccactccccttgagagcagagttgtacacttcattgtgtgtgcttctggagggcagggatggaacatccattcatttagtcaacaactgtggattgagcagtgtctctatgcctg

SEQ ID NO: 462 - DNA, 402 bp, Homo sapiens
ctcacacaccctgccgggtccatgccacattgttctgtgtggctggggaaagttacctcatctctctgagtctgggtctcagtccctcatcttctccagggctgttgttaggagtgaatgaagccatgctcacaaagtgcttagcacagtacttggcctagtgggtgttcgattcacagtggatattgctgttgctactcattgtcagtatatttctgatctccccaacttacagatcaccactccccttgagagcagagttgtacacttcattgtgtgtgcttctggagggcagggatggaacatccattcatttagtcaacaactgtggattgagcagtgtctctatgcctgccactgtgctcagctctgaccacacagcagtgaacagaatagatgagc

SEQ ID NO: 463 - DNA, 402 bp, Homo sapiens
gtctcagtccctcatcttctccagggctgttgttaggagtgaatgaagccatgctcacaaagtgcttagcacagtacttggcctagtgggtgttcgattcacagtggatattgctgttgctactcttgtcagtatatttctgatctccccaacttacagatcaccactccccttgagagcagagttgtacacttcattgtagtgtgcttctggagggcagggatggaacatccattcatttagtcaacaactgtggattgagcagtgtctctatgcctgccactgtgctcagctctgaccacacagcagtgaacagaatagatgagctctctctgtcctcatggagctcacagcccagtggggaagacagatatataggcaacaagtttttaattgcaagta

SEQ ID NO: 464 - DNA, 402 bp, Homo sapiens
ctcagtccctcatcttctccagggctgttgttaggagtgaatgaagccatgctcacaaagtgcttagcacagtacttggcctagtgggtgttcgattcacagtggatattgctgttgctactcttgtcagtatatttctgatctccccaacttacagatcaccactccccttgagagcagagttgtacacttcattgtgtagtgcttctggagggcagggatggaacatccattcatttagtcaacaactgtggattgagcagtgtctctatgcctgccactgtgctcagctctgaccacacagcagtgaacagaatagatgagctctctctgtcctcatggagctcacagcccagtggggaagacagatatataggcaacaagtttttaattgcaagtaaa

SEQ ID NO: 465 - DNA, 402 bp, Homo sapiens
ttcacagtggatattgctgttgctactcttgtcagtatatttctgatctccccaacttacagatcaccactccccttgagagcagagttgtacacttcattgtgtgtgcttctggagggcagggatggaacatccattcatttagtcaacaactgtggattgagcagtgtctctatgcctgccactgtgctcagctctgactcacacagcagtgaacagaatagatgagctctctctgtcctcatggagctcacagcccagtggggaagacagatatataggcaacaagtttttaattgcaagtaaaggtgccagccccaaaaaacaccaagtcacaggatacagaacaatgtgggatggaccgggcagggtgtatgagtttcctgttgctgctgtaacaaa

SEQ ID NO: 466 - DNA, 402 bp, Homo sapiens
gcaacagagcgagactctgtctcaaaaaaaaaaaaaaaaaaaaaaaaagctaatataaatgtattatcttgcagttctggaggtcagaagtccaaaatgagtcttatgggactcaaatcaaggtgttgtagtgctgtgttccttccgggggctccaggggaaagtgtttccttgcctgttacagcttctggaggccactcagcattccttgtctcacggccccttcctccatgtcctaagcacatccctccaatctctgcttctgtcatcacatggccttcctctgaccctgagcctctgcctccttctgagaaagacccttgtgattacatcaggttcacctggataattcaggataatctcttcatctcaaaatccttaagttgatcacatctgcaaaat

SEQ ID NO: 467 - DNA, 402 bp, Homo sapiens
aacagagcgagactctgtctcaaaaaaaaaaaaaaaaaaaaaaaaagctaatataaatgtattatcttgcagttctggaggtcagaagtccaaaatgagtcttatgggactcaaatcaaggtgttgtagtgctgtgttccttccgggggctccaggggaaagtgtttccttgcctgttacagcttctggaggccactcacagttccttgtctcacggccccttcctccatgtcctaagcacatccctccaatctctgcttctgtcatcacatggccttcctctgaccctgagcctctgcctccttctgagaaagacccttgtgattacatcaggttcacctggataattcaggataatctcttcatctcaaaatccttaagttgatcacatctgcaaaatct

SEQ ID NO: 468 - DNA, 402 bp, Homo sapiens
ctggaggccactcacattccttgtctcacggccccttcctccatgtcctaagcacatccctccaatctctgcttctgtcatcacatggccttcctctgaccctgagcctctgcctccttctgagaaagacccttgtgattacatcaggttcacctggataattcaggataatctcttcatctcaaaatccttaagttgatctacatctgcaaaatctctcttaccatgtaaggtaacatattcacagcttctggggattaggacatgcatccctagggaaccatgattcaacctagcatgggggaacccactacaggcaggtgttgtccttgccatcgccagctcagtgcttggcacagtagaggccatggatattcattcagagagagcatgcactgaggc

SEQ ID NO: 469 - DNA, 402 bp, Homo sapiens
ttgtccttgccatcgccagctcagtgcttggcacagtagaggccatggatattcattcagagagagcatgcactgaggcaagcctgacctcaagatcaagacaggaaattggctttcatgggttaaggacctgttactttgctcatcaatgtatccttaatcatcagaggtcagatctgctggagagtgcaatctttcaggtttccaaaagtaagactggatgccttagaacttaaagtcagggaggtacccaagaaagcaatcatagactgagtccccatgcagtgcactttctcggatggacaatttctctgttctgacagtcactgttgactccatttctcagatgagggaccgaggcacagagaggtgcagtcagtcacctgaggccacacagtcagg

SEQ ID NO: 470 - DNA, 402 bp, Homo sapiens
atattcattcagagagagcatgcactgaggcaagcctgacctcaagatcaagacaggaaattggctttcatgggttaaggacctgttactttgctcatcaatgtatccttaatcatcagaggtcagatctgctggagagtgcaatctttcagtttccaaaagtaagactggatgccttagaacttaaagtcagggaggtacgccaagaaagcaatcatagactgagtccccatgcagtgcactttctcggatggacaatttctctgttctgacagtcactgttgactccatttctcagatgagggaccgaggcacagagaggtgcagtcagtcacctgaggccacacagtcaggaagtggaaatccatggaaactcatcatcagctgcctcgcatcagggcc

SEQ ID NO: 471 - DNA, 402 bp, Homo sapiens
gacaggaaattggctttcatgggttaaggacctgttactttgctcatcaatgtatccttaatcatcagaggtcagatctgctggagagtgcaatctttcagtttccaaaagtaagactggatgccttagaacttaaagtcagggaggtacccaagaaagcaatcatagactgagtccccatgcagtgcactttctcggatgtgacaatttctctgttctgacagtcactgttgactccatttctcagatgagggaccgaggcacagagaggtgcagtcagtcacctgaggccacacagtcaggaagtggaaatccatggaaactcatcatcagctgcctcgcatcagggccagtgctctttatctccaccccacacattataaagccactcagctttacact

SEQ ID NO: 472 - DNA, 402 bp, Homo sapiens
caatctttcagtttccaaaagtaagactggatgccttagaacttaaagtcagggaggtacccaagaaagcaatcatagactgagtccccatgcagtgcactttctcggatggacaatttctctgttctgacagtcactgttgactccatttctcagatgagggaccgaggcacagagaggtgcagtcagtcacctgaggcctacacagtcaggaagtggaaatccatggaaactcatcatcagctgcctcgcatcagggccagtgctctttatctccaccccacacattataaagccactcagctttacactcaagggaacttcctatttccctactggattatatgtataatttgtagtattgcaagatttgaacagaagcgagcagcagcttgtagttgt

SEQ ID NO: 473 - DNA, 402 bp, Homo sapiens
tttccaaaagtaagactggatgccttagaacttaaagtcagggaggtacccaagaaagcaatcatagactgagtccccatgcagtgcactttctcggatggacaatttctctgttctgacagtcactgttgactccatttctcagatgagggaccgaggcacagagaggtgcagtcagtcacctgaggccacacagtcaggtaagtggaaatccatggaaactcatcatcagctgcctcgcatcagggccagtgctctttatctccaccccacacattataaagccactcagctttacactcaagggaacttcctatttccctactggattatatgtataatttgtagtattgcaagatttgaacagaagcgagcagcagcttgtagttgtgtgtgtcactc

SEQ ID NO: 474 - DNA, 402 bp, Homo sapiens
tcagggaggtacccaagaaagcaatcatagactgagtccccatgcagtgcactttctcggatggacaatttctctgttctgacagtcactgttgactccatttctcagatgagggaccgaggcacagagaggtgcagtcagtcacctgaggccacacagtcaggaagtggaaatccatggaaactcatcatcagctgcctcggcatcagggccagtgctctttatctccaccccacacattataaagccactcagctttacactcaagggaacttcctatttccctactggattatatgtataatttgtagtattgcaagatttgaacagaagcgagcagcagcttgtagttgtgtgtgtcactcactcctgcctgtggggatgccacgtgattgtttaaag

SEQ ID NO: 475 - DNA, 402 bp, Homo sapiens
catttctcagatgagggaccgaggcacagagaggtgcagtcagtcacctgaggccacacagtcaggaagtggaaatccatggaaactcatcatcagctgcctcgcatcagggccagtgctctttatctccaccccacacattataaagccactcagctttacactcaagggaacttcctatttccctactggattatatgctataatttgtagtattgcaagatttgaacagaagcgagcagcagcttgtagttgtgtgtgtcactcactcctgcctgtggggatgccacgtgattgtttaaagggttggaatcaggagaaaggcaggctcagagcaggaccaagagagagcccacccctcgcctccccaaatccttcagcttcctgaagtgtggctgctgg

SEQ ID NO: 476 - DNA, 402 bp, Homo sapiens
gtgtgtcactcactcctgcctgtggggatgccacgtgattgtttaaagggttggaatcaggagaaaggcaggctcagagcaggaccaagagagagcccacccctcgcctccccaaatccttcagcttcctgaagtgtggctgctgggtagcagctcccccagggaagaaaatataagatattcccaagggaccctggaagactttatcccaaggcttcacatgtgtaggctgtttcctgtgattcggtctggctgtcaatgatctaagattgagagccaaggtcagtgaggggggaaaagggacatgtagtgcaggggttcagcatccaggcctaggacttagactgaggctctttaccctcctctgtttcttgctgatggccttaggcaagtcgcttcccc

SEQ ID NO: 477 - DNA, 402 bp, Homo sapiens
aagggttggaatcaggagaaaggcaggctcagagcaggaccaagagagagcccacccctcgcctccccaaatccttcagcttcctgaagtgtggctgctgggtagcagctcccccagggaagaaaatataagatattcccaagggaccctggaagctttatcccaaggcttcacatgtgtaggctgtttcctgtgattcgagtctggctgtcaatgatctaagattgagagccaaggtcagtgaggggggaaaagggacatgtagtgcaggggttcagcatccaggcctaggacttagactgaggctctttaccctcctctgtttcttgctgatggccttaggcaagtcgcttcccctctctgaccctcagtttttccctctgatgaaatgggtgtaataat

SEQ ID NO: 478 - DNA, 402 bp, Homo sapiens
atattcccaagggaccctggaagctttatcccaaggcttcacatgtgtaggctgtttcctgtgattcggtctggctgtcaatgatctaagattgagagccaaggtcagtgaggggggaaaagggacatgtagtgcaggggttcagcatccaggcctaggacttagactgaggctctttaccctcctctgtttcttgctgaatggccttaggcaagtcgcttcccctctctgaccctcagtttttccctctgatgaaatgggtgtaataattgtgcctacctcttcagggttgctgtgggataaaatgagctcatacttacttcttttttttttttttttttttgagacagagtctcgctctgtagcccaggctggagtgcagtggcgcgatctcggctcact

SEQ ID NO: 479 - DNA, 402 bp, Homo sapiens
taggacttagactgaggctctttaccctcctctgtttcttgctgatggccttaggcaagtcgcttcccctctctgaccctcagtttttccctctgatgaaatgggtgtaataattgtgcctacctcttcagggttgctgtgggataaaatgagctcatacttacttcttttttttttttttttttttgagacagagtctcagctctgtagcccaggctggagtgcagtggcgcgatctcggctcactgcaagctccacctcctgggttcacaccattctcctgcctcagcctcccaagtagctgggactacaggtgctgccaccatacctggctaactttttttgtatttttagtagagacggggtttcaccatgttagccagtatggtctcgatctcctga

SEQ ID NO: 480 - DNA, 402 bp, Homo sapiens
attgtgcctacctcttcagggttgctgtgggataaaatgagctcatacttacttcttttttttttttttttttttgagacagagtctcgctctgtagcccaggctggagtgcagtggcgcgatctcggctcactgcaagctccacctcctgggttcacaccattctcctgcctcagcctcccaagtagctgggactacagagtgctgccaccatacctggctaactttttttgtatttttagtagagacggggtttcaccatgttagccagtatggtctcgatctcctgacctcttgatccacccgcctcggcctcccaaagtgctgggattacaggcgtgaggcaccgcacccagccagcgagctcatactttcatgttagcattagcatagttcctgaca

SEQ ID NO: 481 - DNA, 402 bp, Homo sapiens
cttcagggttgctgtgggataaaatgagctcatacttacttcttttttttttttttttttttgagacagagtctcgctctgtagcccaggctggagtgcagtggcgcgatctcggctcactgcaagctccacctcctgggttcacaccattctcctgcctcagcctcccaagtagctgggactacaggtgctgccaccatagcctggctaactttttttgtatttttagtagagacggggtttcaccatgttagccagtatggtctcgatctcctgacctcttgatccacccgcctcggcctcccaaagtgctgggattacaggcgtgaggcaccgcacccagccagcgagctcatactttcatgttagcattagcatagttcctgacaataagaaccaaat

SEQ ID NO: 482 - DNA, 402 bp, Homo sapiens
cacctcctgggttcacaccattctcctgcctcagcctcccaagtagctgggactacaggtgctgccaccatacctggctaactttttttgtatttttagtagagacggggtttcaccatgttagccagtatggtctcgatctcctgacctcttgatccacccgcctcggcctcccaaagtgctgggattacaggcgtgagcgcaccgcacccagccagcgagctcatactttcatgttagcattagcatagttcctgacaataagaaccaaatacgtggtatctgctattttctgttttaattaggtattcagagtctatgttaaattaattaacatatatacttatggaacacctactcagtgccaggtattgttgtagatgccaggagtacagcagggaa

SEQ ID NO: 483 - DNA, 402 bp, Homo sapiens
tgggttcacaccattctcctgcctcagcctcccaagtagctgggactacaggtgctgccaccatacctggctaactttttttgtatttttagtagagacggggtttcaccatgttagccagtatggtctcgatctcctgacctcttgatccacccgcctcggcctcccaaagtgctgggattacaggcgtgaggcaccgcagcccagccagcgagctcatactttcatgttagcattagcatagttcctgacaataagaaccaaatacgtggtatctgctattttctgttttaattaggtattcagagtctatgttaaattaattaacatatatacttatggaacacctactcagtgccaggtattgttgtagatgccaggagtacagcagggaataaaaca

SEQ ID NO: 484 - DNA, 402 bp, Homo sapiens
ccattctcctgcctcagcctcccaagtagctgggactacaggtgctgccaccatacctggctaactttttttgtatttttagtagagacggggtttcaccatgttagccagtatggtctcgatctcctgacctcttgatccacccgcctcggcctcccaaagtgctgggattacaggcgtgaggcaccgcacccagccagctgagctcatactttcatgttagcattagcatagttcctgacaataagaaccaaatacgtggtatctgctattttctgttttaattaggtattcagagtctatgttaaattaattaacatatatacttatggaacacctactcagtgccaggtattgttgtagatgccaggagtacagcagggaataaaacaacatccctgt

SEQ ID NO: 485 - DNA, 402 bp, Homo sapiens
cctgcctcagcctcccaagtagctgggactacaggtgctgccaccatacctggctaactttttttgtatttttagtagagacggggtttcaccatgttagccagtatggtctcgatctcctgacctcttgatccacccgcctcggcctcccaaagtgctgggattacaggcgtgaggcaccgcacccagccagcgagctcagtactttcatgttagcattagcatagttcctgacaataagaaccaaatacgtggtatctgctattttctgttttaattaggtattcagagtctatgttaaattaattaacatatatacttatggaacacctactcagtgccaggtattgttgtagatgccaggagtacagcagggaataaaacaacatccctgtcctcgac

SEQ ID NO: 486 - DNA, 402 bp, Homo sapiens
gtctatgttaaattaattaacatatatacttatggaacacctactcagtgccaggtattgttgtagatgccaggagtacagcagggaataaaacaacatccctgtcctcgacacaaacacacaagtaaatagagaaggtcagagataaatgctgtgcaggaaaacaaagcaaagtgagggatggagagtgcggaaggttgagggcacttttgtttcagatgagtgtcagggaagcccccttggaggaggcactgtaagggcacagactcgaatgaaaggagtatgtgaaggtgcttaaattgtttctgtttggtttggtgtggtgtgatgtggtgtggtgtggtgtggtgtggtgtggtgtggtgtggtgtggtgtggtgtggtgtgatgtgatgtggtgtg

SEQ ID NO: 487 - DNA, 402 bp, Homo sapiens
gatgccaggagtacagcagggaataaaacaacatccctgtcctcgacacaaacacacaagtaaatagagaaggtcagagataaatgctgtgcaggaaaacaaagcaaagtgagggatggagagtgcggaaggttggggcacttttgtttcagatgagtgtcagggaagcccccttggaggaggcactgtaagggcacagaactcgaatgaaaggagtatgtgaaggtgcttaaattgtttctgtttggtttggtgtggtgtgatgtggtgtggtgtggtgtggtgtggtgtggtgtggtgtggtgtggtgtggtgtggtgtgatgtgatgtggtgtgcggtgcggtgcggtgcggtgtggtgtggtatgggttgaggctggccttaggagcctgttggcctt

SEQ ID NO: 488 - DNA, 402 bp, Homo sapiens
cttcatctcccctagtgttcctttccccctctgcaaaatgggaatggggatggctcagaactcccagcgggagttaggaggaataatgtataggaagtatgagcagagtgcctggcctggagcatagcgcatggccgatcataggtaagtgctggtgttgattttattggacacaagtttggaaactcagagcctgcaggagatggccttgaaggtaaagaagaggtagttgggagttttacacttcccaggacctaccctcagagagacaggggtcattccagagtatctggatacccagtttgggccaaagatacttccagccagggcactcgtcaaccaccttgatatttgcccaacacagctcctctgaggagagcttgaggtctgggggccccatgc

SEQ ID NO: 489 - DNA, 402 bp, Homo sapiens
gccgatcataggtaagtgctggtgttgattttattggacacaagtttggaaactcagagcctgcagggatggccttgaaggtaaagaagaggtagttgggagttttacacttcccaggacctaccctcagagagacaggggtcattccagagtatctggatacccagtttgggccaaagatacttccagccagggcactcagtcaaccaccttgatatttgcccaacacagctcctctgaggagagcttgaggtctgggggccccatgctgctgattaaactgatggctgggaggcaggtaaagcaagagtggagaagtgagtctggaggtggaaatgagatctccaaggaggggatggctgactgaggctgacacgtttctatccaaccggtagaggattt

SEQ ID NO: 490 - DNA, 402 bp, Homo sapiens
cctcagagagacaggggtcattccagagtatctggatacccagtttgggccaaagatacttccagccagggcactcgtcaaccaccttgatatttgcccaacacagctcctctgaggagagcttgaggtctgggggccccatgctgctgattaaactgatggctgggaggcaggtaaagcaagagtggagaagtgagtctaggaggtggaaatgagatctccaaggaggggatggctgactgaggctgacacgtttctatccaaccggtagaggatttgcagttggactctgctttatggcttggtgatggtcagtgttggggcaggcactaggtcagagggtgatgggaggggtgagggaggttccagtctcacgctaggctgcctgcaccttcagcctca

SEQ ID NO: 491 - DNA, 402 bp, Homo sapiens
agatctccaaggaggggatggctgactgaggctgacacgtttctatccaaccggtagaggatttgcagttggactctgctttatggcttggtgatggtcagtgttggggcaggcactaggtcagagggtgatgggaggggtgagggaggttccagtctcacgctaggctgcctgcaccttcagcctcagctacctcaccacgctaactggggaggattaactataactctgaccattcctgggactgtctccatttcaaacaatcagatcccctgccagactgtattagtcagagcagtgcaaatgctgtaacaaacagccccaagtgtctgtggctgaaaccatgacagtttacttctcgttgccatggcagccagtgcagctcagagtggatgggcatgt

SEQ ID NO: 492 - DNA, 402 bp, Homo sapiens
ggaggggatggctgactgaggctgacacgtttctatccaaccggtagaggatttgcagttggactctgctttatggcttggtgatggtcagtgttggggcaggcactaggtcagagggtgatgggaggggtgagggaggttccagtctcacgctaggctgcctgcaccttcagcctcagctacctcaccacctaactgggagaggattaactataactctgaccattcctgggactgtctccatttcaaacaatcagatcccctgccagactgtattagtcagagcagtgcaaatgctgtaacaaacagccccaagtgtctgtggctgaaaccatgacagtttacttctcgttgccatggcagccagtgcagctcagagtggatgggcatgtctgcatctgc

SEQ ID NO: 493 - DNA, 402 bp, Homo sapiens
tgacacgtttctatccaaccggtagaggatttgcagttggactctgctttatggcttggtgatggtcagtgttggggcaggcactaggtcagagggtgatgggaggggtgagggaggttccagtctcacgctaggctgcctgcaccttcagcctcagctacctcaccacctaactggggaggattaactataactctgaccgattcctgggactgtctccatttcaaacaatcagatcccctgccagactgtattagtcagagcagtgcaaatgctgtaacaaacagccccaagtgtctgtggctgaaaccatgacagtttacttctcgttgccatggcagccagtgcagctcagagtggatgggcatgtctgcatctgcatgcatgcaggctccttccatc

SEQ ID NO: 494 - DNA, 402 bp, Homo sapiens
agagggtgatgggaggggtgagggaggttccagtctcacgctaggctgcctgcaccttcagcctcagctacctcaccacctaactggggaggattaactataactctgaccattcctgggactgtctccatttcaaacaatcagatcccctgccagactgtattagtcagagcagtgcaaatgctgtaacaaacagccccagagtgtctgtggctgaaaccatgacagtttacttctcgttgccatggcagccagtgcagctcagagtggatgggcatgtctgcatctgcatgcatgcaggctccttccatcctgaagctccccatcctcgcccttacactgctggctgggaaagggagcctggaggaagcctcaggtttgtatggggcaggcctggaagtg

SEQ ID NO: 495 - DNA, 402 bp, Homo sapiens
cagtctcacgctaggctgcctgcaccttcagcctcagctacctcaccacctaactggggaggattaactataactctgaccattcctgggactgtctccatttcaaacaatcagatcccctgccagactgtattagtcagagcagtgcaaatgctgtaacaaacagccccaagtgtctgtggctgaaaccatgacagtttagcttctcgttgccatggcagccagtgcagctcagagtggatgggcatgtctgcatctgcatgcatgcaggctccttccatcctgaagctccccatcctcgcccttacactgctggctgggaaagggagcctggaggaagcctcaggtttgtatggggcaggcctggaagtgaggtgcaccacctccactcctatcccctgg

SEQ ID NO: 496 - DNA, 402 bp, Homo sapiens
acgctaggctgcctgcaccttcagcctcagctacctcaccacctaactggggaggattaactataactctgaccattcctgggactgtctccatttcaaacaatcagatcccctgccagactgtattagtcagagcagtgcaaatgctgtaacaaacagccccaagtgtctgtggctgaaaccatgacagtttacttctcagttgccatggcagccagtgcagctcagagtggatgggcatgtctgcatctgcatgcatgcaggctccttccatcctgaagctccccatcctcgcccttacactgctggctgggaaagggagcctggaggaagcctcaggtttgtatggggcaggcctggaagtgaggtgcaccacctccactcctatcccctgggccagaa

SEQ ID NO: 497 - DNA, 402 bp, Homo sapiens
atttcaaacaatcagatcccctgccagactgtattagtcagagcagtgcaaatgctgtaacaaacagccccaagtgtctgtggctgaaaccatgacagtttacttctcgttgccatggcagccagtgcagctcagagtggatgggcatgtctgcatctgcatgcatgcaggctccttccatcctgaagctccccatcctcagcccttacactgctggctgggaaagggagcctggaggaagcctcaggtttgtatggggcaggcctggaagtgaggtgcaccacctccactcctatcccctgggccagaacttgggcatctgaccacacagacttcccttggaaggagaagagaacaaggacactgtgcacctttgtcaagccaaccaccatgcccatggag

SEQ ID NO: 498 - DNA, 402 bp, Homo sapiens
gccagaacttgggcatctgaccacacagacttcccttggaaggagaagagaacaaggacactgtgcacctttgtcaagccaaccaccatgcccatggagcatctactatgtgcagagatgtcagctcctccagacaatgttctctgtcattttccatctgttcaagctgagtcagaggtgtgtacatgtgcaaatgcgaacgaatccaggctcacttcctgcttccctgagtcctaggctaacctctagcacagcacagatcacaagagtgatgactgcctgaccgtgtgtccttcctcccagtagagtttgagccacatggaggcaggggccacagcctgtattctcaggacttggacagcggtggaagctctacttagcttgctgaagaggaaaggggaa

SEQ ID NO: 499 - DNA, 402 bp, Homo sapiens
gaggtgtgtacatgtgcaaatgcgaacaatccaggctcacttcctgcttccctgagtcctaggctaacctctagcacagcacagatcacaagagtgatgactgcctgaccgtgtgtccttcctcccagtagagtttgagccacatggaggcaggggccacagcctgtattctcaggacttggacagcggtggaagctctactttagcttgctgaagaggaaaggggaaagaaaggagagtgaattggcacttgtcgagatctcccagttcgttttttaaaaattgtggtaaaatatatgtaacagaaaatttaccatcttaaccattttggagtgcgcagttcagtaccaccaagtaccttcacgttgttggacaaacttcaccaccatctgtctctagaat

SEQ ID NO: 500 - DNA, 402 bp, Homo sapiens
ggagagtgaattggcacttgtcgagatctcccagttcgttttttaaaaattgtggtaaaatatatgtaacagaaaatttaccatcttaaccattttggagtgcgcagttcagtaccaccaagtaccttcacgttgttggacaaacttcaccaccatctgtctctagaatgttcttcatcttgcaaaaccaaaactctgtactccattaaacgactccccattccctcttcccccagctcctagcaactaccattctattttctatctctacaaatttgactactctaggtacctcgtataattggaatcaacagtatttgtaccctggcttatttcatttagcataatgtcctcagactttattcatgttgttgcatgtgtcagaatttccttcctttgtaa

SEQ ID NO: 501 - DNA, 402 bp, Homo sapiens
cagttcgttttttaaaaattgtggtaaaatatatgtaacagaaaatttaccatcttaaccattttggagtgcgcagttcagtaccaccaagtaccttcacgttgttggacaaacttcaccaccatctgtctctagaatgttcttcatcttgcaaaaccaaaactctgtacccattaaacgactccccattccctcttcccctcagctcctagcaactaccattctattttctatctctacaaatttgactactctaggtacctcgtataattggaatcaacagtatttgtaccctggcttatttcatttagcataatgtcctcagactttattcatgttgttgcatgtgtcagaatttccttcctttgtaaagctgaataatttttcattataagtatatac

SEQ ID NO: 502 - DNA, 402 bp, Homo sapiens
ttcacgttgttggacaaacttcaccaccatctgtctctagaatgttcttcatcttgcaaaaccaaaactctgtacccattaaacgactccccattccctcttcccccagctcctagcaactaccattctattttctatctctacaaatttgactactctaggtacctcgtataattggaatcaacagtatttgtaccctgagcttatttcatttagcataatgtcctcagactttattcatgttgttgcatgtgtcagaatttccttcctttgtaaagctgaataatttttcattataagtatataccacactttgtttatccattcacttgtcgatggaaatttgggttgcatccacctttttttgctattgtgcataatgctgctatacacatggctgtg

SEQ ID NO: 503 - DNA, 402 bp, Homo sapiens
cattcctaccagcagtgcacaagagttccaatttctccatatcctcaccaacacttgttattttctgttgctgctgtttgtttttttattaatagtcatcctaatgggtgtgaagttgtttctcattgtggtttgctttgcaggttttgatttgtagattttcctgatgattagtgatgggtgcatcttttcatgttcttatctgaccttttatatatctttcttggagaaatgtctgttaactctactcatacttttgtaaatagtattcccaatccttctaactccccaatgaggtggatattagtatgttcgtgttacagtaaagccaactaaaccttagaaagactaggttaattatccaaggtcacacagctagaaaatgacacagcttgtattgaa

SEQ ID NO: 504 - DNA, 402 bp, Homo sapiens
tagattttcctgatgattagtgatgggtgcatcttttcatgttcttactgaccttttatatatctttcttggagaaatgtctgttaactctactcatacttttgtaaatagtattcccaatccttctaactccccaatgaggtggatattagtatgttcgtgttacagtaaagccaactaaaccttagaaagactaggttatattatccaaggtcacacagctagaaaatgacacagcttgtattgaaacatcagtttttctctttccaaacctaacgcacatttcatgaaacctacattattgcaccataacatcatgttgatttacttatctgctctcctgcctgtcccatctactacataaattgagtgtggtttgaaatcagagactacttctcatct

SEQ ID NO: 505 - DNA, 402 bp, Homo sapiens
acttgagttagctgctggaaacctgggcttcctcttctgcaaaatggggagagaaaataaattctcagtggattgtttagaagatttgagcaaagacctctgcaaagtgctaagcatgtggctagcatgtggcaggtgctgcctaaatagtagaaattaacactgccatgcttataagctccggacaaacacaagaagccctgaaacataatctgtgccttctgcttgcattcctcctagttggggatgtaaaatagcccagctacaatcaaagaagaaaatcaaagtcagcacagactatggatatgcttctatatgtgtagattatttccagactcattcggaagaatctggacatactggttgcctcagaggtcaagaaaattggctcatttacttctg

SEQ ID NO: 506 - DNA, 402 bp, Homo sapiens
tgaggtggtgggaagaacgtaggctctagcttcaggtgagcttggaaaagtcagtgaacatttatggacctctgttgtataacagaatacaagatataattcttcattcaatcttgtgtcaagagcttgagtcaagatataattcttggaagagacatctgacattgagggtcccccctcccatgttatgggactcaagtacttccaaaggatgactttccctaggagacacagctagagattggcaaccccaggacctttgaatattcaacaatacccagtagggtatgaagcaccgtaggagttccgtgactattcccatcttccctcatttttgttggtacctcttccttcctgataaatcacatctgctgggaataatccaataataggatgcacaga

SEQ ID NO: 507 - DNA, 402 bp, Homo sapiens
ccgtaggagttccgtgactattcccatcttccctcatttttgttggtacctcttccttcctgataaatcacatctgctgggaataatccaataataggatgcacagagccagccacagtgtgttggacacctcaggaagtgtcccatcttgggtatgtctgtcctcaccttgggtagaaagagatggtatttgactctttctcccaccagaagaggggtatggccatgtggttacaagagcagcacttcatagtatgaaagccagggttccaagacaactactcccagtgtggggctggcatgttagtgactctaactacagtttctttttttttattattgtttgagacagagtctcgctctgccacccaggctggagtgcagtggcacagtctcggctca

SEQ ID NO: 508 - DNA, 402 bp, Homo sapiens
tctgtcctcaccttgggtagaaagagatggtatttgactctttccccaccagaagaggggtatggccatgtggttacaagagcagcacttcatagtatgaaagccagggttccaagacaactactcccagtgtggggctggcatgttagtgactctaactacagtttctttttttttattattgtttgagacagagtctcagctctgccacccaggctggagtgcagtggcacagtctcggctcactgcaacatccgcctcccaggttcaagcaattctcctgcctcagcctcctgagtagctgggattacagctgcccaccaccacacccaactagtttttgtatttttagtagagatgggttttcaccatgttggccaggctgctcttgatctcctgacc

SEQ ID NO: 509 - DNA, 402 bp, Homo sapiens
atgagccactgcacccagcctaactacagtttctttatctgtaaattggaaataacaatagtcccactgatgagttatggaaagtagggccttccacggtgtctgcatgtggcaaacattacccatagctcctgttgggtttctcgtgaggagtgtaacagtttggccatgcagttttaaatgccacatgagcggctagggtgggagggagtaccgggccaatccaactcagtcaacacaggtcccccacaccatttcctctgtggcaggtataagagtcaaggcccacttcaaggccaccaaagtccaagcatctccccagtcctagcttccccagagagtcctgaatgacaggtattcattggttgtgatggggcttgtctggggttggggactgggggt

SEQ ID NO: 510 - DNA, 402 bp, Homo sapiens
atggctctgataaagaagcccatgatgctggaaggaagggctccctgcaggaccctctgggatgattccctgcccatctccaggaccaccctccagaatatggtctaggatggccttgagtgcgtaggtttcagaatgtgggaagaaggggcaaggagaaaaaaacaagcacctattgatcacctgtgttagctcattcaagtctttctaacatctctgcaggttaaatattctatcccattttacagagggcaagctaaaactgagagatctaagatgattttgccaaggttacactgctagcaaatggttagatttgaacccaagactctaactccaaagagccaagctctttacagtggatcagtccatcatctctttacattttacaagtttgtgtca

SEQ ID NO: 511 - DNA, 402 bp, Homo sapiens
taaccttaatgaaggtgtgcatgtgagatgcatgtgggagtcagtgtctcgggtggtgagcttcatccagactcatttcaaactagcttgcacagcagagcttccagcaatgcaaatgccaggttactcgaggctccctctaagatgcagggactcaaaaagttgtttctgaagctccagggcctttataacggggcttcagaaagcagcagaaagaaacagcacacaaagtgtttgtttattctcttgtattcaagaaagagccaataattcaaacaactaattctagaagaatagaattcccccagtccccaccttaatacaggcaggctcacctgtccattggtaagtcagcacatttctctgtgaacactgatgccctgtgcccatcacacccatagt

SEQ ID NO: 512 - DNA, 402 bp, Homo sapiens
ctccctctaagatgcagggactcaaaaagttgtttctgaagctccagggcctttataacggggcttcgaaagcagcagaaagaaacagcacacaaagtgtttgtttattctcttgtattcaagaaagagccaataattcaaacaactaattctagaagaatagaattcccccagtccccaccttaatacaggcaggctcaacctgtccattggtaagtcagcacatttctctgtgaacactgatgccctgtgcccatcacacccatagtatcaactgtcaggacagctgccagatgaaagtgctgtcatcatgggcagctgcctcttggaccaggagctaagggagaaactccttccttagagacccacgccagactgcagtgttgtttgagagacctgagt

SEQ ID NO: 513 - DNA, 402 bp, Homo sapiens
ctgtcatcatgggcagctgcctcttggaccaggagctaagggagaaactccttccttagagacccacgccagactgcagtgttgtttgagagacctgagtctctcagggatgtgttctggagatctgcgagcaggactgtatccatgaatcaggactctgtcttaagccacagtagggaagaggaatggcacaatagaggagaacaccaccccacgtagcatggagccatggagagagcatgagtttagaagccaggagcgccagctctgccagctactggccaaaccactgggggccagtgcctcggccatctgtgaacagacactgctggataatgatctcaaagctctcatcctgtctaacaccatccagtttgagacctgcttaatcagtggggttct

SEQ ID NO: 514 - DNA, 402 bp, Homo sapiens
gagagacctgagtctctcagggatgtgttctggagatctgcgagcaggactgtatccatgaatcaggactctgtcttaagccacagtagggaagaggaatggcacaatagaggaaacaccaccccacgtagcatggagccatggagagagcatgagtttagaagccaggagcgccagctctgccagctactggccaaaccatctgggggccagtgcctcggccatctgtgaacagacactgctggataatgatctcaaagctctcatcctgtctaacaccatccagtttgagacctgcttaatcagtggggttctgggaggccagagctggagctatgatcagggctaaaatgcatacagaaagcacagatgctagaagccaaatggaggttgtccaggggg

SEQ ID NO: 515 - DNA, 402 bp, Homo sapiens
cagatgctagaagccaaatggaggttgtccagggggtccccaaccatgggactggaagcagatgtcaaaatcaaggatcagagcttctgggaagcagacacagcaagggaacatgagtagtgtgagctcacgctgagtgagcactggctgtgcaccagtattgaataggtattaactcccttcagctgcacaattatgctagtaggtgagttttaccttgggaaaccaaggcacagaatttaagtaacatattgaagctcatgcagctgctaacagggaaggccagggtctgaacccagctgatccggctccagcatccgagctctgaaccactggtctatcctgcctctgttaggacttggtccaatgtcatcatcctagaaggaacatttaggcccgcac

SEQ ID NO: 516 - DNA, 402 bp, Homo sapiens
ttgtccagggggtccccaaccatgggactggaagcagatgtcaaaatcaaggatcagagcttctgggaagcagacacagcaagggaacatgagtagtgtgagctcacgctgagtgagcactggctgtgcaccagtattgaataggtattaactcccttcagctgcacaattatgctgtaggtgagttttaccttgggaaactcaaggcacagaatttaagtaacatattgaagctcatgcagctgctaacagggaaggccagggtctgaacccagctgatccggctccagcatccgagctctgaaccactggtctatcctgcctctgttaggacttggtccaatgtcatcatcctagaaggaacatttaggcccgcacggtgggtggctggttcaatccagt

SEQ ID NO: 517 - DNA, 402 bp, Homo sapiens
ctgaaccactggtctatcctgcctctgttaggacttggtccaatgtcatcatcctagaaggaacatttaggcccgcacggtgggtggctggttcaatccagtttaaaggccaggagcaggacagtgacttgcagctgcagcaatcctatgactcaaaccaaagcagctgtgacaaataaagggactgactctcattctccctgtgctagggaaggatgagctatcaggccttgttgcaggctgagtcagtcatcccacaaaccacctaagtgaaacctcttcactgagccttatttcctgagcgctctccctttatctgtgcttgcaaagaggcgtctccctccatgccagccaacccacccacccccgcacacacataccacctctggctggaactgacga

SEQ ID NO: 518 - DNA, 402 bp, Homo sapiens
agctgcagcaatcctatgactcaaaccaaagcagctgtgacaaataaagggactgactctcattctcccgtgctagggaaggatgagctatcaggccttgttgcaggctgagtcagtcatcccacaaaccacctaagtgaaacctcttcactgagccttatttcctgagcgctctccctttatctgtgcttgcaaagaggctgtctccctccatgccagccaacccacccacccccgcacacacataccacctctggctggaactgacgaccatgggttttagaaatgagataaatctgggagatgaatgtattcatgagcccataaaggggtcatgaatcactggccccaattactgccttcaatcctgacaggatgaattccctcaagcagattctcctt

SEQ ID NO: 519 - DNA, 402 bp, Homo sapiens
tggtgaatgcccaccttgagctggacacctggctgtggtccctggagttggatagcctgggttcaaattctttaactaccattttctggccaacccattctctgtgtgccccggacaaggtacctaccctgtgagtatagaagcaaacccccagaaaaaagcaagtggaaaaagcaaagaaccaggacatgggtggactcagagtcctagagaggctcaggaaacttttatccaaagacacagaggagctggttgcagaggagagcttaaactcacacagagaggggaggcctgggaggtgtcaacaagttatcttctcacttcagaagggccctctcgagaacagggatttcccctgctctgcaagggaccagtggacagaagtcagcagaggccatgtag

SEQ ID NO: 520 - DNA, 402 bp, Homo sapiens
agtatagaagcaaacccccagaaaaaagcaagtggaaaaagcaaagaaccaggacatgggtggactcgagtcctagagaggctcaggaaacttttatccaaagacacagaggagctggttgcagaggagagcttaaactcacacagagaggggaggcctgggaggtgtcaacaagttatcttctcacttcagaagggcccgtctcgagaacagggatttcccctgctctgcaagggaccagtggacagaagtcagcagaggccatgtaggggcaggagcttcctgtcatcatagatgccaaagctgaagcaggatactgaatgcaaacaggccctgaggccatctgatgtgctcgttcccatagccccgctgtgtgtgtgtgcgcgtgtgtgtgtgtgtgtg

SEQ ID NO: 521 - DNA, 402 bp, Homo sapiens
actcacacagagaggggaggcctgggaggtgtcaacaagttatcttctcacttcagaagggccctctcgagaacagggatttcccctgctctgcaagggaccagtggacagaagtcagcagaggccatgtaggggcaggagcttcctgtcatcatagatgccaaagctgaagcaggatactgaatgcaaacaggccctgaaggccatctgatgtgctcgttcccatagccccgctgtgtgtgtgtgcgcgtgtgtgtgtgtgtgtgtgtgtgtgtgtgtgtgtgtgtttggtggggtgggaggggaggcagaagaggaagagagggcagagagccaaagactgaggccccggcccataagtaaggcagtttgcagatctcaatatcctgtgcagacccacag

SEQ ID NO: 522 - DNA, 402 bp, Homo sapiens
aactactaggcatacagtagcgctcaataagtgctagctattatgattacaatggagggaaaagttgtcaccgcagcacaccgtgcatccctttttggtctggggcctctcatccagacacaggtaagaagactcctcactccccgaggaatcgcgtgcaatgtcatgatggcatctgatttagttttcccacatctcaaagtgagatcagggcaactagtcttactcaacccttcagacttacataccctgtgtatcaaggaatgagtctcccatcattggagacaatcaagtagagcctttctggtggaggagaaggaagtagacaagtggagctcagaggtgccctcccaccccgagattccatgatgctcaggactgtggaatgagcacgggagtgtg

SEQ ID NO: 523 - DNA, 402 bp, Homo sapiens
atctgatttagttttcccacatctcaaatgagatcagggcaactagtcttactcaacccttcagacttacataccctgtgtatcaaggaatgagtctcccatcattggagacaatcaagtagagcctttctggtggaggagaaggaagtagacaagtggagctcagaggtgccctcccaccccgagattccatgatgctcagggactgtggaatgagcacgggagtgtgatggacctaggggtggggaagagcgagaagttcccgtgcaatggacctaggggtggggaagagcgagaagtcagaacactggcagaagaggaagaaaccagacaacctggaagccaagcagatgagtttcacctgcatatcctctcctcttcccccttcctccagcgttgact

SEQ ID NO: 524 - DNA, 402 bp, Homo sapiens
caatggacctaggggtggggaagagcgagaagtcagaacactggcagaagaggaagaaaccagacaacctggaagccaagcagatgagtttcacctgcatatcctctcctcttcccccttcctccagcgttgacttatgggaggtatttcagtgaggacaaaagaggacttagtcaaacaagcacttattgaaagaaaatattattctacacagcacttccgtccttttaaagtgattcactccctttccactgcctattctgtttaggagaaaagtggagcttcttagcttggtgcccaaggtcctcatcaatcctaagatgacatttattgagagcacatgatgtgccaggcattgttacaggcaccagctcattcaagccatataaagacaaccctgtg

SEQ ID NO: 525 - DNA, 402 bp, Homo sapiens
gaagagcgagaagtcagaacactggcagaagaggaagaaaccagacaacctggaagccaagcagatgagtttcacctgcatatcctctcctcttcccccttcctccagcgttgacttatgggaggtatttcagtgaggacaaaagaggacttagtcaaacaagcacttattgaaagaaaatatattctacacagcacttccggtccttttaaagtgattcactccctttccactgcctattctgtttaggagaaaagtggagcttcttagcttggtgcccaaggtcctcatcaatcctaagatgacatttattgagagcacatgatgtgccaggcattgttacaggcaccagctcattcaagccatataaagacaaccctgtggtgtaggttctctcagggt

SEQ ID NO: 526 - DNA, 402 bp, Homo sapiens
acagctagttagtagtagagctgggacctgaactcaggtaactggtccttacgctactgttcttaatcccgtacttaagtcgaccagccctgccctgccttggctccagcctcaccttaagtttctcaccacctggagtttttggccaatgccacacggaatgaccagcatttctctgaacacatcatgctgtatttagcagtccaggctttagcacagctgttccctgtgcctggaattctcttccttttttgtttttttctcacccaaaaccagcttgtcctttaagatccagcttaatgttctcctactcttgggagccttttttggtgcccccaaccccatcaggccacgtagcacctggtagcaccaggtagcaccccatcctctgtgtgcccacgc

SEQ ID NO: 527 - DNA, 402 bp, Homo sapiens
actggtccttacgctactgttcttaatcccgtacttaagtcgaccagccctgccctgccttggctccagcctcaccttaagtttctcaccacctggagtttttggccaatgccacacggaatgaccagcatttctctgaacacatcatgctgtatttagcgtccaggctttagcacagctgttccctgtgcctggaattcctcttccttttttgtttttttctcacccaaaaccagcttgtcctttaagatccagcttaatgttctcctactcttgggagccttttttggtgcccccaaccccatcaggccacgtagcacctggtagcaccaggtagcaccccatcctctgtgtgcccacgcctacctcctctctacctcacccaccctggacagaccctca

SEQ ID NO: 528 - DNA, 402 bp, Homo sapiens
acagcaaatggttagagcttaagctctgcatccaaaagggcctggattcagatctccactcagccatgtgttagctgtgcgaccctgggcaagctagcccgctgctcctcacactccacggtcgctgtgaggtgtaatgagatcgcacatataaattgattagtgcagggtctggaatgcagcaagcagatggccaatgaagtgtttggcaacactgcacttcagaatcgggctctacctagacagacttcatatcaaattccagctctcccacttaccagctgtgtgaccttgaacaagtcacttagcctctctgagtttaattcctcctctataaaatgggcttcatatttttaaaatggcaaagattctaaagattacaaacacaacacctgcgtcgct

SEQ ID NO: 529 - DNA, 402 bp, Homo sapiens
tgtgaggtgtaatgagatcgcacatataaattgattagtgcagggtctggaatgcagcaagcagatggccaatgaatgtttggcaacactgcacttcagaatcgggctctacctagacagacttcatatcaaattccagctctcccacttaccagctgtgtgaccttgaacaagtcacttagcctctctgagtttaattccttcctctataaaatgggcttcatatttttaaaatggcaaagattctaaagattacaaacacaacacctgcgtcgcttccctctgtgtacagagcagcgttgttgcagtttgcgcgctaaggctgtagactgggctgcagtgccttttaaatacaccagctcctggtttggagctaatgggacacatgccggggacggctgg

SEQ ID NO: 530 - DNA, 402 bp, Homo sapiens
taccagctgtgtgaccttgaacaagtcacttagcctctctgagtttaattcctcctctataaaatgggcttcatatttttaaaatggcaaagattctaaagattacaaacacaacacctgcgtcgcttccctctgtgtacagagcagcgttgttgcagtttgcgcgctaaggctgtagactgggctgcagtgccttttaaagtacaccagctcctggtttggagctaatgggacacatgccggggacggctgggagtcacagcggtgtagaggagaatatggcttcaagaaaatgacatttggaagtaattatgggagcaatggatcggaaccacagtcagctgccagctatccccagagacatcacaggagaaggaggcagaagctggaacatcatccggg

SEQ ID NO: 531 - DNA, 402 bp, Homo sapiens
acaagtcacttagcctctctgagtttaattcctcctctataaaatgggcttcatatttttaaaatggcaaagattctaaagattacaaacacaacacctgcgtcgcttccctctgtgtacagagcagcgttgttgcagtttgcgcgctaaggctgtagactgggctgcagtgccttttaaatacaccagctcctggtttgagagctaatgggacacatgccggggacggctgggagtcacagcggtgtagaggagaatatggcttcaagaaaatgacatttggaagtaattatgggagcaatggatcggaaccacagtcagctgccagctatccccagagacatcacaggagaaggaggcagaagctggaacatcatccgggagctggactagaacgtcccg

SEQ ID NO: 532 - DNA, 402 bp, Homo sapiens
gcaaagattctaaagattacaaacacaacacctgcgtcgcttccctctgtgtacagagcagcgttgttgcagtttgcgcgctaaggctgtagactgggctgcagtgccttttaaatacaccagctcctggtttggagctaatgggacacatgccggggacggctgggagtcacagcggtgtagaggagaatatggcttcaatgaaaatgacatttggaagtaattatgggagcaatggatcggaaccacagtcagctgccagctatccccagagacatcacaggagaaggaggcagaagctggaacatcatccgggagctggactagaacgtcccgggaaacttcagcctggcttctgctttgtcccgaaaacccagggctccagctccagggctctgtctt

SEQ ID NO: 533 - DNA, 402 bp, Homo sapiens
gcttcaagaaaatgacatttggaagtaattatgggagcaatggatcggaaccacagtcagctgccagctatccccagagacatcacaggagaaggaggcagaagctggaacatcatccgggagctggactagaacgtcccgggaaacttcagcctggcttctgctttgtcccgaaaacccagggctccagctccagggctcgtgtcttagaatgaggcagtttatctgttcagggcttctcttagtttttaatcccaataggacacatgttgtattaaaaagccatgcgagacggaagaaggaaattgaatgaaatttgagggcaggtaggagcagagacaataaataattcagcagtgaaggaagcagaaaaaagattgcactcatttcgcccttcaacaa

SEQ ID NO: 534 - DNA, 402 bp, Homo sapiens
gctatccccagagacatcacaggagaaggaggcagaagctggaacatcatccgggagctggactagaacgtcccgggaaacttcagcctggcttctgctttgtcccgaaaacccagggctccagctccagggctctgtcttagaatgaggcagtttatctgttcagggcttctcttagtttttaatcccaataggacacactgttgtattaaaaagccatgcgagacggaagaaggaaattgaatgaaatttgagggcaggtaggagcagagacaataaataattcagcagtgaaggaagcagaaaaaagattgcactcatttcgcccttcaacaattatactaaacacctgctctgggccacagaagggccagatcccattcctgtgctcaggaagcccac

SEQ ID NO: 535 - DNA, 402 bp, Homo sapiens
aaggaggcagaagctggaacatcatccgggagctggactagaacgtcccgggaaacttcagcctggcttctgctttgtcccgaaaacccagggctccagctccagggctctgtcttagaatgaggcagtttatctgttcagggcttctcttagtttttaatcccaataggacacatgttgtattaaaaagccatgcgagactggaagaaggaaattgaatgaaatttgagggcaggtaggagcagagacaataaataattcagcagtgaaggaagcagaaaaaagattgcactcatttcgcccttcaacaattatactaaacacctgctctgggccacagaagggccagatcccattcctgtgctcaggaagcccacaggccggcagggagaggctggttgg

SEQ ID NO: 536 - DNA, 402 bp, Homo sapiens
attcagcagtgaaggaagcagaaaaaagattgcactcatttcgcccttcaacaattatactaaacacctgctctgggccacagaagggccagatcccattcctgtgctcaggaagcccacaggccggcagggagaggctggttggaatgtgtgctttgcactgtaacggaggcatcgagcatggtaagggactggcggtgagctgctgcctgcggacgtcgagcaggggcctttgaagaggcaggacctgtctggagtcttacctgggccttggccctggcaatggggaatggagcaggcagcaggggacagatgctgccagaaaccgagatggtgccggaggactgggctgagtctgggtcaaatgacaccgccccaggctctctgccctctggggtgagg

SEQ ID NO: 537 - DNA, 402 bp, Homo sapiens
gccggcagggagaggctggttggaatgtgtgctttgcactgtaacggaggcatcgagcatggtaagggactggcggtggctgctgcctgcggacgtcgagcaggggcctttgaagaggcaggacctgtctggagtcttacctgggccttggccctggcaatggggaatggagcaggcagcaggggacagatgctgccagaagaccgagatggtgccggaggactgggctgagtctgggtcaaatgacaccgccccaggctctctgccctctggggtgaggcaggaggctgcctctgtgtgtgattcagagaccctagaatcccagtggccatcaccccacagcacatgccaacctttctgtgataactttctcttgtggaactgtgaaagtgtaagaccagc

SEQ ID NO: 538 - DNA, 402 bp, Homo sapiens
ttgtggaactgtgaaagtgtaagaccagctcctgtatagtgcatggccatcctttgctttggggacagtaagtcagtcaacacatacttataaatggggtcctgggccgtggcactgatctggtcctcccaccttgcctcacactgcccttcccactcaccacttccctcctctgcatcttagccgcaagggactttcagatccaagcagacctggaatcaaatcccaccgctgggcctcaatgccagtggagacaggaacagctgatccctggagccctcaggaggaagaggacgggatgcctggcttggctgctggtctggggcaggtgcccagttacagcagttggaaaaatcctcagtgttggaaggaaatttggaagtgagcatctacctgcctgcc

SEQ ID NO: 539 - DNA, 402 bp, Homo sapiens
cctcacactgcccttcccactcaccacttccctcctctgcatcttagccgcaagggactttcagaccaagcagacctggaatcaaatcccaccgctgggcctcaatgccagtggagacaggaacagctgatccctggagccctcaggaggaagaggacgggatgcctggcttggctgctggtctggggcaggtgcccagtatacagcagttggaaaaatcctcagtgttggaaggaaatttggaagtgagcatctacctgcctgccgtgcagtttgtgacttttaagatggttgacagaacattcccaaaggaccacagcggtgaccactgttctcgtttccctttggtggctcactcactcagtgctggacacagtggtcctgacaagacagtgctgtggc

SEQ ID NO: 540 - DNA, 402 bp, Homo sapiens
agttggaaaaatcctcagtgttggaaggaaatttggaagtgagcatctacctgcctgccgtgcagtttgtgacttttaagatggttgacagaacattcccaaaggaccacagcggtgaccactgttctcgtttccctttggtggctcactcactcagtgctggacacagtggtcctgacaagacagtgctgtggcttccactgaacctaggacagggatagactcaaggactaagaacaaaccaggaagaagcatcaccacaggctccttgccagtcacctcatctcaccctcctggccctggcggatgggtctccatatttacaggggccagatgaaaaaaccagaggagccaggaaaaggagcttccccttcccaagggcgcaaggtgaggtgccagtca

SEQ ID NO: 541 - DNA, 402 bp, Homo sapiens
aaaaatcctcagtgttggaaggaaatttggaagtgagcatctacctgcctgccgtgcagtttgtgacttttaagatggttgacagaacattcccaaaggaccacagcggtgaccactgttctcgtttccctttggtggctcactcactcagtgctggacacagtggtcctgacaagacagtgctgtggcttccatgaaccctaggacagggatagactcaaggactaagaacaaaccaggaagaagcatcaccacaggctccttgccagtcacctcatctcaccctcctggccctggcggatgggtctccatatttacaggggccagatgaaaaaaccagaggagccaggaaaaggagcttccccttcccaagggcgcaaggtgaggtgccagtcatgagat

SEQ ID NO: 542 - DNA, 402 bp, Homo sapiens
agaacattcccaaaggaccacagcggtgaccactgttctcgtttccctttggtggctcactcactcagtgctggacacagtggtcctgacaagacagtgctgtggcttccatgaacctaggacagggatagactcaaggactaagaacaaaccaggaagaagcatcaccacaggctccttgccagtcacctcatctcacccttcctggccctggcggatgggtctccatatttacaggggccagatgaaaaaaccagaggagccaggaaaaggagcttccccttcccaagggcgcaaggtgaggtgccagtcatgagatgcaagccctgagctttctgattccactgcatgtggtcccaaggttcggcgccgcatcacacagttagtgagcacactctcctc

SEQ ID NO: 543 - DNA, 402 bp, Homo sapiens
agacagtgctgtggcttccatgaacctaggacagggatagactcaaggactaagaacaaaccaggaagaagcatcaccacaggctccttgccagtcacctcatctcaccctcctggccctggcggatgggtctccatatttacaggggccagatgaaaaaaccagaggagccaggaaaaggagcttccccttcccaagggctgcaaggtgaggtgccagtcatgagatgcaagccctgagctttctgattccactgcatgtggtcccaaggttcggcgccgcatcacacagttagtgagcacactctcctcccctggccccgagtgagccagctggatggcagatcagaaagagaagtcccgggtgcccccaacatggctagctccttccaggaccaggggc

SEQ ID NO: 544 - DNA, 402 bp, Homo sapiens
caggggctaggccccagctaaggctggtgcacacagcagggcagggggcgaaggagtgggatcccacccagggatcccacccaccccaaacctgctttcggacatctttccaatgcataatgtgcagatgaggccctttgataaggaccaaatccctttccgttgcttggcaacctggctcacaagtcatagcagggaagctaatttacaggaattcaaagtgtcgctggaggttctgctgagctgaattgctgcaaagaggaacctcaatggtccaaatcacacctctggcggggaggaggggctgaaggaaaagcttccacttccgtcacttgagagtacagagccctgagctcagactcagcgatcgttttccattaacggatttactggttccatgtt

SEQ ID NO: 545 - DNA, 402 bp, Homo sapiens
gcagggcagggggcgaaggagtgggatcccacccagggatcccacccaccccaaacctgctttcggacatctttccaatgcataatgtgcagatgaggccctttgataaggaccaaatccctttccgttgcttggcaacctggctcacaagtcatagcagggaagtaatttacaggaattcaaagtgtcgctggaggttcgtgctgagctgaattgctgcaaagaggaacctcaatggtccaaatcacacctctggcggggaggaggggctgaaggaaaagcttccacttccgtcacttgagagtacagagccctgagctcagactcagcgatcgttttccattaacggatttactggttccatgttgagctcctgctgtgtggcaggccctgtgctgggag

SEQ ID NO: 546 - DNA, 402 bp, Homo sapiens
cagggcagggggcgaaggagtgggatcccacccagggatcccacccaccccaaacctgctttcggacatctttccaatgcataatgtgcagatgaggccctttgataaggaccaaatccctttccgttgcttggcaacctggctcacaagtcatagcagggaagtaatttacaggaattcaaagtgtcgctggaggttctagctgagctgaattgctgcaaagaggaacctcaatggtccaaatcacacctctggcggggaggaggggctgaaggaaaagcttccacttccgtcacttgagagtacagagccctgagctcagactcagcgatcgttttccattaacggatttactggttccatgttgagctcctgctgtgtggcaggccctgtgctgggagc

SEQ ID NO: 547 - DNA, 402 bp, Homo sapiens
aattcaaagtgtcgctggaggttctgctgagctgaattgctgcaaagaggaacctcaatggtccaaatcacacctctggcggggaggaggggctgaaggaaaagcttccacttccgtcacttgagagtacagagccctgagctcagactcagcgatcgttttccattaacggatttactggttccatgttgagctcctgcatgtgtggcaggccctgtgctgggagccagggacacagtgacaaacgagacagatgccaaccccggatgcacagagctcaaagagacagaggagtaaacagggctacacatgtgacaagataggctgtgcacaggggtctgagcaggacccttggggcaggaggaggcagtggagggatgggagggtagggacgcagtggtg

SEQ ID NO: 548 - DNA, 402 bp, Homo sapiens
caggaggaggcagtggagggatgggagggtagggacgcagtggtgaccagctagccagatagagaacagagggtgtcccagcacagggccacacaagcaaaggcagaggtggggagagaagagcctgccacactctcagatcaccatgtggttgggccagggccccagctgaggctgaggacacatggagcccagatccgcgcagggccttgaatgccaagtcagaaagcatctgaaatttagtctacagatgatgtgggttattgacagccaggacagggaatgacatttgtgtttcaggaaaaccactgtcttcactgttagggggtagattcagggagaaacaggaggtggaggggaagaaactgtgagtaaaggagtctctggggtacaggtgaagtt

SEQ ID NO: 549 - DNA, 402 bp, Homo sapiens
aacttgaagtaggatggagaggaagggacaagttcccctggcatggtgacggcccggtggtgggaaccagggaagaggaggggctttgcaggtgtctgacttgcccaacaggtggcgccatttaccaagatgggaagggccggggagaagggagggttccattctagggaaatctcaggtcctcgctattaggattctttacggttgccagtgactgaaacccagctgaaatggacttgggaacatactggttcatgacatctggtggaggtgaggtcagggtgcactggagccctggcagcccactctgatgccagagcccatggggacagcggtgtatgttggacacagtagtccttcaagggcggggatcggaggaacagaagaaaggaacagcagatg

SEQ ID NO: 550 - DNA, 402 bp, Homo sapiens
agggacaagttcccctggcatggtgacggcccggtggtgggaaccagggaagaggaggggctttgcaggtgtctgacttgcccaacaggtggcgccatttaccaagatgggaagggccggggagaagggagggttccattctagggaaatctcaggtcctcgctattaggattctttcggttgccagtgactgaaacccaagctgaaatggacttgggaacatactggttcatgacatctggtggaggtgaggtcagggtgcactggagccctggcagcccactctgatgccagagcccatggggacagcggtgtatgttggacacagtagtccttcaagggcggggatcggaggaacagaagaaaggaacagcagatgccccactgaggctgagcagaaca

SEQ ID NO: 551 - DNA, 402 bp, Homo sapiens
tggtgacggcccggtggtgggaaccagggaagaggaggggctttgcaggtgtctgacttgcccaacaggtggcgccatttaccaagatgggaagggccggggagaagggagggttccattctagggaaatctcaggtcctcgctattaggattctttcggttgccagtgactgaaacccagctgaaatggacttgggaacagtactggttcatgacatctggtggaggtgaggtcagggtgcactggagccctggcagcccactctgatgccagagcccatggggacagcggtgtatgttggacacagtagtccttcaagggcggggatcggaggaacagaagaaaggaacagcagatgccccactgaggctgagcagaacatttaggatccttggccccat

SEQ ID NO: 552 - DNA, 402 bp, Homo sapiens
ccagggaagaggaggggctttgcaggtgtctgacttgcccaacaggtggcgccatttaccaagatgggaagggccggggagaagggagggttccattctagggaaatctcaggtcctcgctattaggattctttcggttgccagtgactgaaacccagctgaaatggacttgggaacatactggttcatgacatctggtgagaggtgaggtcagggtgcactggagccctggcagcccactctgatgccagagcccatggggacagcggtgtatgttggacacagtagtccttcaagggcggggatcggaggaacagaagaaaggaacagcagatgccccactgaggctgagcagaacatttaggatccttggccccatctcattgtgccctttgctgtggc

SEQ ID NO: 553 - DNA, 402 bp, Homo sapiens
ctgaggctgagcagaacatttaggatccttggccccatctcattgtgccctttgctgtggctcatctcacacttgcagggagaagccaatggatctctgtgaatggcgaggctttgtatgcataaatgtgggccattttgtccccaagaatccctgggggtgaggaagccacagaaaattgaggtcctattccctgctcacttcctggtatgtagtggaagctggagagcctttgtccaggcactgacagcaggaggtttcatgcagagctgctcagggcatttcccagatctgtcccacccctgggaactggctcagtggccttgccccaccagaagactgggaactgcacccaagacaggttcagcccccccaggagaggacctgctggtgtgcgtgtcc

SEQ ID NO: 554 - DNA, 402 bp, Homo sapiens
tcagtggccttgccccaccagaagactgggaactgcacccaagacaggttcagcccccccaggagaggacctgctggtgtgcgtgtccacacacagcacagaagcaaggaagatctggcaaacaaccttcaacaaaaaagaggccatttgcactggccacctgtgctgcttctttcctgagcagacttggttctgagccacgggggtctccctctttccctcctccagctcaggaaaggactcaggcacatgtccacccaacctgcaggagagtgtggcacagcagtgaaaggcctgggcttcgcaggccaacttgggtttgatttttggctctgtgtcacaggcctcatgagatgtgctcacctcttagctccctcatttcagaatggggatgagaatctg

SEQ ID NO: 555 - DNA, 402 bp, Homo sapiens
atactcagcccatcttaatttttttactgtgggaaaatacacataacataaaatgtactattttaaccattttaaaggatgcaattcagtggcattaattacattcacaacggcatgcagccatcaccactatctggttccagaactttctcatcacctcagatggaagccccgtattcactaagaagccactccccattacccacctcccccaactcctggcaaccaccaatctgctttctgtttctgtggatttgcctattctggatatttcatttaaaggcatcgtgcaatatgtggccttttgtgcctggcttctttctctcagcaccatgttttagggtctatctacgttgtagcatgggtcagtacttcaaccctgttcttttttttttttttttt

SEQ ID NO: 556 - DNA, 402 bp, Homo sapiens
caccactatctggttccagaactttctcatcacctcagatggaagccccgtattcactaagaagccactccccattcccacctcccccaactcctggcaaccaccaatctgctttctgtttctgtggatttgcctattctggatatttcatttaaaggcatcgtgcaatatgtggccttttgtgcctggcttctttctctctagcaccatgttttagggtctatctacgttgtagcatgggtcagtacttcaaccctgttcttttttttttttttttttttttgagatggagtatccctctgttgctcaggctgaagtgcagtggcacgacctcagctccctgtaacctctgccccctgggttcaagtcattctcctgcctcagcctcccatgtagctggga

SEQ ID NO: 557 - DNA, 402 bp, Homo sapiens
ctcagctccctgtaacctctgccccctgggttcaagtcattctcctgcctcagcctcccatgtagctgggattacaggcacgtaccaccacacctggctaagttttgtatttttagtagcgacggggttttgccatgttggccaggctggttttgaactcctgacctcaggtgatctgcccacctcggcctctcaaagtgcgtgggattacaggcgtgagccaccacgcctggccacttcatccctttttatggctgagtaacattccattgtgtggatataccacacggttttgtttattcatcagttgatgaacctttggattgtctcacattttgaccattgtgaatcatgctgctataaatattcatgtacaagtttttatttgaacacttgtctcta

SEQ ID NO: 558 - DNA, 402 bp, Homo sapiens
acctctgccccctgggttcaagtcattctcctgcctcagcctcccatgtagctgggattacaggcacgtaccaccacacctggctaagttttgtatttttagtagcgacggggttttgccatgttggccaggctggttttgaactcctgacctcaggtgatctgcccacctcggcctctcaaagtggtgggattacaggcagtgagccaccacgcctggccacttcatccctttttatggctgagtaacattccattgtgtggatataccacacggttttgtttattcatcagttgatgaacctttggattgtctcacattttgaccattgtgaatcatgctgctataaatattcatgtacaagtttttatttgaacacttgtctctaattctttggggtat

SEQ ID NO: 559 - DNA, 402 bp, Homo sapiens
tgggttcaagtcattctcctgcctcagcctcccatgtagctgggattacaggcacgtaccaccacacctggctaagttttgtatttttagtagcgacggggttttgccatgttggccaggctggttttgaactcctgacctcaggtgatctgcccacctcggcctctcaaagtggtgggattacaggcgtgagccaccaccgcctggccacttcatccctttttatggctgagtaacattccattgtgtggatataccacacggttttgtttattcatcagttgatgaacctttggattgtctcacattttgaccattgtgaatcatgctgctataaatattcatgtacaagtttttatttgaacacttgtctctaattctttggggtatatacccaggagt

SEQ ID NO: 560 - DNA, 402 bp, Homo sapiens
ggagtggaatcgttggctcatatggtaactctgtgtttaacttattgagaaactgcccaacagttttccataacagctgcaccattgtacgatccctcaagcaaggtgcaagggtatcagtttccccacatcctcatcaatgttcttgtttttatggtccttccagtgggtgtgaggctctttttactttttaatcaccaaggcagagatctctcaaccaactataaaatgattaaatgactgatagcctttgtgatcaatcagactggctggagaacaggaagatgagaggagcctggagtccctgacccagaaggtggccatctcaaatgttttttccatcttccagggctgtggactgggcagtttgggacccgggaggggcaggccgtgagacctgtc

SEQ ID NO: 561 - DNA, 402 bp, Homo sapiens
ggctctttttactttttaatcaccaggcagagatctctcaaccaactataaaatgattaaatgactgatagcctttgtgatcaatcagactggctggagaacaggaagatgagaggagcctggagtccctgacccagaaggtggccatctcaaatgttttttccatcttccagggctgtggactgggcagtttgggacccagggaggggcaggccgtgagacctgtctagtgcacatgtgcgacctcatccgatcctcatagtaacacttactaaaattcttaaccattaccccaccagtctatgtccacacggccacgctcacagccgtccctgcagtgtcccaggcccactctcacttgttctttgcagaacctcatgatgaatgcagcatccactgttt

SEQ ID NO: 562 - DNA, 402 bp, Homo sapiens
gatgtgttctcaagcgggcaatgcctcaagcctcctgttgaggctagaggaaggaccacctcctgttcaccagcatgcacagactagacaggacggctccgtctgtcgcgcttctgttggtctctcatgcccaagggtgtggctctgggatcagcctgccctggttcggatctacttaattgtcactgtcactttcagctctgttatttagcctccagtgcttccattttctcaggggtgtagtgggatgatgaaaacaattcccgtttcgtagagtagtgatgaagagtaaatgagctaatcccagtaaaaagctttaactcctgagccacagtaagtgctcagtttatctaagcatcattatcaaacataaacaatcatttacagagtgatgaccaccgt

SEQ ID NO: 563 - DNA, 402 bp, Homo sapiens
catgctcattccaatcatggcaaagaaaatgcagtgtcttctcacgaagggttcatccctgcctcctcagtggctgtttcaaggagggccctttggtttgcccagatagactattcacactgaaagtgacaatggagaaactggccaggacactccaaggtcacagagaggtttgtggaggtgagatgagggtctcagccaggcggggagggattccggagggcagcgatccctaaggtggagccttccagccacaggatgtgtgacgagaaagttttccctcttctcccctcacagcccgcaacaaaatctacatggcttgccaatattcttggagaatgaatttggggggctgtatttgtttcccatgactgctacaacaaattaccacaaactgagtgg

SEQ ID NO: 564 - DNA, 402 bp, Homo sapiens
aaatgcagtgtcttctcacgaagggttcatccctgcctcctcagtggctgtttcaaggagggccctttggtttgcccagatagactattcacactgaaagtgacaatggagaaactggccaggacactccaaggtcacagagaggtttgtggaggtgagatgagggtctcagccggcggggagggattccggagggcagcagatccctaaggtggagccttccagccacaggatgtgtgacgagaaagttttccctcttctcccctcacagcccgcaacaaaatctacatggcttgccaatattcttggagaatgaatttggggggctgtatttgtttcccatgactgctacaacaaattaccacaaactgagtgggtttaaaacaatagacatttattctc

SEQ ID NO: 565 - DNA, 402 bp, Homo sapiens
gcccagatagactattcacactgaaagtgacaatggagaaactggccaggacactccaaggtcacagagaggtttgtggaggtgagatgagggtctcagccggcggggagggattccggagggcagcgatccctaaggtggagccttccagccacaggatgtgtgacgagaaagttttccctcttctcccctcacagcccagcaacaaaatctacatggcttgccaatattcttggagaatgaatttggggggctgtatttgtttcccatgactgctacaacaaattaccacaaactgagtgggtttaaaacaatagacatttattctctcactgccctgaaggctagaaggtccagatcaaggagtgaggacagaagaaggtaggcactagaacttgaccc

SEQ ID NO: 566 - DNA, 402 bp, Homo sapiens
ggggcagcagatcttttgggcttcatgtcatagtattgtaaagacaattgccaaagtcagacaagatcagttgtgtgatcttggcaattcactttgtttctctgagcctcagtttactcacccataaaatggggagaaccacgtctacctgactgactcgtgatgaagatgaaattaacacaaagacaaggctgggcgcaagtggctcacgccagtaatcccagcactttgggaggccgaggcatgtggatcatctgaggtcaggagtttgagaccagcctggccaacatggtaaaaccccgtctctactaaaaatacaaaaattggccaggtgtggtgatgggcaccagtaatcccagcgactcgggaggctgaggtaggagaatcgcttgaacccgggag

SEQ ID NO: 567 - DNA, 402 bp, Homo sapiens
agctgagatgcactccagcctgggcgacagggtgaaactgtctcaaaaaaaaaaaaaaattaatgcaaagacaaaattagtgtgggaaaaccctttgctcagagaaatgatggccacaaagtcatattactccccccttactctgtaaaatctcctttgctagaggaagagttaaaagtccaagtgggaagcacagtcccagggcggaggcagggaaggctatcctggctctgagtcgggctctgtctacctggattttgtgcctccacgttccctttcatcactctccaacagggagatgtctgtctcccctcagtgtgatagtaatataatggggcctcctggtgctcctcagaatcacgtgctctgggcaggaaaaaggtgcaattctcctgcagaatg

SEQ ID NO: 568 - DNA, 402 bp, Homo sapiens
aagacaaaattagtgtgggaaaaccctttgctcagagaaatgatggccacaaagtcatattactccccccttactctgtaaaatctcctttgctagaggaagagttaaaagtccaagtgggaagcacagtcccgggcggaggcagggaaggctatcctggctctgagtcgggctctgtctacctggattttgtgcctccactgttccctttcatcactctccaacagggagatgtctgtctcccctcagtgtgatagtaatataatggggcctcctggtgctcctcagaatcacgtgctctgggcaggaaaaaggtgcaattctcctgcagaatgtacacagcaaagactggaaacgagaaaactgtcttccccagggtggcttcctaacaaatataatgag

SEQ ID NO: 569 - DNA, 402 bp, Homo sapiens
aaatgatggccacaaagtcatattactccccccttactctgtaaaatctcctttgctagaggaagagttaaaagtccaagtgggaagcacagtcccgggcggaggcagggaaggctatcctggctctgagtcgggctctgtctacctggattttgtgcctccacgttccctttcatcactctccaacagggagatgtctgctctcccctcagtgtgatagtaatataatggggcctcctggtgctcctcagaatcacgtgctctgggcaggaaaaaggtgcaattctcctgcagaatgtacacagcaaagactggaaacgagaaaactgtcttccccagggtggcttcctaacaaatataatgagaaggcgcttcctctcttcctttcagtcacatggggag

SEQ ID NO: 570 - DNA, 402 bp, Homo sapiens
tgctagaggaagagttaaaagtccaagtgggaagcacagtcccgggcggaggcagggaaggctatcctggctctgagtcgggctctgtctacctggattttgtgcctccacgttccctttcatcactctccaacagggagatgtctgtctcccctcagtgtgatagtaatataatggggcctcctggtgctcctcagaatctacgtgctctgggcaggaaaaaggtgcaattctcctgcagaatgtacacagcaaagactggaaacgagaaaactgtcttccccagggtggcttcctaacaaatataatgagaaggcgcttcctctcttcctttcagtcacatggggaggtcaacagagagcaatgactgtcctgaggctatttatttattttttgcctgat

SEQ ID NO: 571 - DNA, 402 bp, Homo sapiens
ccaagagcttatccatttactcagactttttgattattttttgtgcaatttcacagacttttggtgatgcataaaatttttttagagtactagtttgggcctggcatggcagctcactcctgtaatctcagcactttgggaggctaaagcagcagaatcacttgaggccaggagttcaagaccagcctgggcaacatagcagagacctcactaaaaataaaacaaaaaataaaaataatacaaaaaattagccaagcatggtggcacactcctgtagtcccaactacttgggagactgaggcaggaagatgtcttaagcccagaaattcgaggttgcagtgagctataatcacaccactgcactccagcctggatgacagaacaagatcctgtctctaaaaa

SEQ ID NO: 572 - DNA, 402 bp, Homo sapiens
tgtctctaaaaacaaacaaacaaataaacaaatactactttgctcattcatttaagtcagtaaattgtgacaaatggaaaaatgcaagaaaaaaaaggaagctggacataaagctagaatggaaaatgcatgagctcttgctggggtgggtcctaatttggcttttagcttcctagcagcccttgcaaagaagaaaacaacgatctgttaggtaaatctctatagcagtggttcccaagacatggtctcctgaccagcagtatcagcactacctgggaacctgttagattgtccctctccaccctcgaatctgggagtcaggcccaggcatctggtttaacgagccccctaggtgatgatgatacatgctgaggagtacgaaccacttatgttagaataaat

SEQ ID NO: 573 - DNA, 402 bp, Homo sapiens
aaagcctggagaatatcccagcattgctgttagaagccaggactctggagccaggctgacccaaatttgaatcttaggtgcacctttcattaactgagtgaccttggccaattcccttaattccctccctctgcctcagtttcttcatgtataagaggaaaatgactattttatgtattccatggagttgctgtaaaaatctcaatgggctaacagaccgtatgcttagtatggtgcttagtatgctaatgagtccttataaatgttcccacgattatgaactgctagagtgtgtttcctgtaggtaaacctccaagccatcaaacctatgtccatgtctcctgccaccatctgtcctggatgattattgttcagatgcatattccaaacttactgagtacc

SEQ ID NO: 574 - DNA, 402 bp, Homo sapiens
tcttaggtgcacctttcattaactgagtgaccttggccaattcccttaattccctccctctgcctcagtttcttcatgtataagaggaaaatgactattttatgtattccatggagttgctgtaaaaattcaatgggctaacagaccgtatgcttagtatggtgcttagtatgctaatgagtccttataaatgttcccacagattatgaactgctagagtgtgtttcctgtaggtaaacctccaagccatcaaacctatgtccatgtctcctgccaccatctgtcctggatgattattgttcagatgcatattccaaacttactgagtacctagtatgtgcggggttctttcacttatatcatttgcctttaaacagctctgcactgtagttattattaccc

SEQ ID NO: 575 - DNA, 402 bp, Homo sapiens
cttaattccctccctctgcctcagtttcttcatgtataagaggaaaatgactattttatgtattccatggagttgctgtaaaaattcaatgggctaacagaccgtatgcttagtatggtgcttagtatgctaatgagtccttataaatgttcccacgattatgaactgctagagtgtgtttcctgtaggtaaacctccaaagccatcaaacctatgtccatgtctcctgccaccatctgtcctggatgattattgttcagatgcatattccaaacttactgagtacctagtatgtgcggggttctttcacttatatcatttgcctttaaacagctctgcactgtagttattattacccattttctgcatcaggaaactgagttccccccaaaatgaactgac

SEQ ID NO: 576 - DNA, 402 bp, Homo sapiens
acagaccgtatgcttagtatggtgcttagtatgctaatgagtccttataaatgttcccacgattatgaactgctagagtgtgtttcctgtaggtaaacctccaagccatcaaacctatgtccatgtctcctgccaccatctgtcctggatgattattgttcagatgcatattccaaacttactgagtacctagtatgtgcaggggttctttcacttatatcatttgcctttaaacagctctgcactgtagttattattacccattttctgcatcaggaaactgagttccccccaaaatgaactgacttttcaaaagtcacacaggtattaagtgccaaagccaggatttgattccaggccttctggcttgacagtggcactcaaattcatcaagtgtttctt

SEQ ID NO: 577 - DNA, 402 bp, Homo sapiens
ctttggagtcaggcctggtttcctaatcatcatattggtcaaagcaagtcacacagccaagcccacaggcagtggggctgggaaggacagagagagaagggagaatcgctactgaatgacagtctaccacacctattgtgcaaagtgctggaagggaggatttgttcattcattctgttaatatatattaactgaacacgatgccaggcactggcctaggtgctgaatatgcagcagtgaatgaaatagacagaagtacttttcctcctggagttcatgttcaagtgaataatggccccacacctcgattaatccacaagcacttaactgtctaccctgtcaggtttccatatgtgccagacacatcatgtccacaagagattctctgcaaccagcgagctc

SEQ ID NO: 578 - DNA, 402 bp, Homo sapiens
gaaggcttgcacgcacgaggggccagaaaacaccccacatggagtgggtcccactctaggccactctcccatcccttcccttttccaaatttcctccctagccacatgccttggtttccagggccagccagctgtgcaaaatgcctagcaagctctcagcaggcccctgctgggcacagcacagagaaattaagtgcaatctagcgtaactaagccatcaccagtaagaggcacttgctctcctggcggctccctttcggagactaatggggatgactagagaggaggatccagagcctatggctgaaacctcatcaacagcttgggagagtgacagccagccagtcttctgcccgcaggctgaagaggcagtgcttcccagggtgagccagaggtcaggaa

SEQ ID NO: 579 - DNA, 402 bp, Homo sapiens
ccctggagacagagtaaaatagctaataattagacaaaacattaattgagtgcttattttatgtcaagtgtgatttgaggactttatatgcactaatttatttagcttcccaaaactccattaataggtactattaatgccccctacttgaaagattaagcaacagaggcatgaaaataataaagtgatatgtccaaaacctacacagctaataagtgagagagccaagatttgaacctgaaggagatgggagggagagaaatagttggggagaccacagggaaaggaggaagaagagaagggaagaaaaggaggcggggagggccgggagctggaaatgtacctttgtattttaagtcattgagatttgggggttgttactgtcacagatcctagcctgtt

SEQ ID NO: 580 - DNA, 402 bp, Homo sapiens
cgacagagtgggattccatctcaaaaatcaaaaaacaaaaaaaggaaaaaacagaacatgaaagccactttcccacagcctgggcacgtagctactgtggtgaatcacctttcctggcagagcacactcaggaaccgtcagctccaaaagcaccaaacagtttcattaagaccgtggctccttcgcagaagcacacggaactgcagactgacaagcctgtgataacattttaatggcctgagttcagttcccaataaaatacttaagtttctgcaatcatggagctggcattttcattaatactcctgattaattgtctgtcctaggaaaaggctcatcaccgtcacaatcccgatcttgctagttccttgcagggagaatcccagcagcctgggcttttcc

SEQ ID NO: 581 - DNA, 402 bp, Homo sapiens
atacttaagtttctgcaatcatggagctggcattttcattaatactcctgattaattgtctgtcctaggaaaaggctcatcaccgtcacaatcccgatcttgctagttccttgcagggagaatcccagcagcctgggcttttccaccaggttaaagctggcaaagggcaaggaagactccctggcacctggtaccctccactttgccatggtaacagaggattacaggctctaagcccagctgctgtccttgcattcagacctcaccactcatacactgggacctggaactacttaaattgcctcagtttctttatgtgtcaaatggcgtttgacacataaagcactaatactaatagtacttacataataaggttgttgtaaggattaattgagttggtac

SEQ ID NO: 582 - DNA, 402 bp, Homo sapiens
attaattgtctgtcctaggaaaaggctcatcaccgtcacaatcccgatcttgctagttccttgcagggagaatcccagcagcctgggcttttccaccaggttaaagctggcaaagggcaaggaagactccctggcacctggtaccctccacttgccatggtaacagaggattacaggctctaagcccagctgctgtccttagcattcagacctcaccactcatacactgggacctggaactacttaaattgcctcagtttctttatgtgtcaaatggcgtttgacacataaagcactaatactaatagtacttacataataaggttgttgtaaggattaattgagttggtacaagtaatgtcctggcacgcatctggcacatagtgagtgcttcctataata

SEQ ID NO: 583 - DNA, 402 bp, Homo sapiens
ccaccaggttaaagctggcaaagggcaaggaagactccctggcacctggtaccctccacttgccatggtaacagaggattacaggctctaagcccagctgctgtccttgcattcagacctcaccactcatacactgggacctggaactacttaaattgcctcagtttctttatgtgtcaaatggcgtttgacacataaagctactaatactaatagtacttacataataaggttgttgtaaggattaattgagttggtacaagtaatgtcctggcacgcatctggcacatagtgagtgcttcctataataaacagtagctgggtttgttgttgttttactattatttttcctccagaaaggcgagagttgcatcagccttggaagaggcaggactgagatgt

SEQ ID NO: 584 - DNA, 402 bp, Homo sapiens
taagcccagctgctgtccttgcattcagacctcaccactcatacactgggacctggaactacttaaattgcctcagtttctttatgtgtcaaatggcgtttgacacataaagcactaatactaatagtacttacataataaggttgttgtaaggattaattgagttggtacaagtaatgtcctggcacgcatctggcacactagtgagtgcttcctataataaacagtagctgggtttgttgttgttttactattatttttcctccagaaaggcgagagttgcatcagccttggaagaggcaggactgagatgtttgggaacaagaccactttcacagggggcagccttttgagaaatgtcatgtctacttgatagggctttaaatatggagtagtgggaat

SEQ ID NO: 585 - DNA, 402 bp, Homo sapiens
agtgttcacagcactttcccaaagctggttctgctcaattccctaaaagatctcctgcaatggggcctccagggtcctaaaagcaccatctgctcttaaagagtctcactgctcattagcatatcaaaggctctgaaatgtcctgcaggaaaaaactctgggctaacttttgtagccctgttccccaaactaaattgaatagaaggattctttttttatgacccacctacagttctgcagagatcctccagggaatgcagatctaacccattctctgtgcagtgaatggcagagaaaattaaagtgattgcatctattgcacacttacttttccttcgaggtaggtgagagagtaaataagatgcaggagagaattacaaccggagatataaaacagttgtc

SEQ ID NO: 586 - DNA, 402 bp, Homo sapiens
agagtctcactgctcattagcatatcaaaggctctgaaatgtcctgcaggaaaaaactctgggctaacttttgtagccctgttccccaaactaaattgaatgaaggattctttttttatgacccacctacagttctgcagagatcctccagggaatgcagatctaacccattctctgtgcagtgaatggcagagaaaattagaagtgattgcatctattgcacacttacttttccttcgaggtaggtgagagagtaaataagatgcaggagagaattacaaccggagatataaaacagttgtcttacagggaatagtctgtttgcccagggaggaggttttcagaatacaaagtaccatttcttctccacgacatccccaggggagaaaggaaagtgaaaga

SEQ ID NO: 587 - DNA, 402 bp, Homo sapiens
ctgttccccaaactaaattgaatgaaggattctttttttatgacccacctacagttctgcagagatcctccagggaatgcagatctaacccattctctgtgcagtgaatggcagagaaaattaaagtgattgcatctattgcacacttacttttccttcgaggtaggtgagagagtaaataagatgcaggagagaattacagaccggagatataaaacagttgtcttacagggaatagtctgtttgcccagggaggaggttttcagaatacaaagtaccatttcttctccacgacatccccaggggagaaaggaaagtgaaagaagccctccaaccgaccactggagatgggagcatttctgctggtttcatttacataagtgtccttggcaatttgtccca

SEQ ID NO: 588 - DNA, 402 bp, Homo sapiens
atgcaggagagaattacaaccggagatataaaacagttgtcttacagggaatagtctgtttgcccagggaggaggttttcagaatacaaagtaccatttcttctccacgacatccccaggggagaaaggaaagtgaaagaagccctccaaccgaccactggagatgggagcatttctgctggtttcatttacataagtgtctcttggcaatttgtcccaatttgtctcattataaatgatgtaaacatccgggcgtaatcacagacaaaatgggatggtttaaatgctgcctgattaaaaaccctgggttggctgcaatgacttgcaggcatgctaacggcttccctgcaagggactttggtttcaaagttctgagagctcaggagggtccctaggtctagt

SEQ ID NO: 589 - DNA, 402 bp, Homo sapiens
tgagagctcaggagggtccctaggtctagttgcaaagtcatgtcccccatgactctgcaactctccacatagagcctagcaagaatgcatcatcttctctatatctcttataaggagggaaggaagaaagggagggaaggagggagggggagagggagggagaaaggaaagaagaaaagaaaggaaagaaggaaggaaggagagggagggagggaggaaaggaggaaggaagggagggagggagggaggaaaggagggaggagggagggagggagggagggagggagctaactgacattttcccctttgccatctgattggcatgaagggcaatgtaactgaggagtctggggaccaaagtgaatcctagtaatgtcactcacttaatatgtgtgatttttt

SEQ ID NO: 590 - DNA, 402 bp, Homo sapiens
caaagtcatgtcccccatgactctgcaactctccacatagagcctagcaagaatgcatcatcttctctatatctcttataaggagggaaggaagaaagggagggaaggagggagggggagagggagggagaaaggaaagaagaaaagaaaggaaagaaggaaggaaggaagggagggagggaggaaaggaggaaggaaggagagggagggagggaggaaaggagggaggagggagggagggagggagggagggagctaactgacattttcccctttgccatctgattggcatgaagggcaatgtaactgaggagtctggggaccaaagtgaatcctagtaatgtcactcacttaatatgtgtgattttttagaccaatcacatcatttggccaagcctcagt

SEQ ID NO: 591 - DNA, 402 bp, Homo sapiens
atagagaagacagcacattcctactgagctctatatggagagctgcagtcatgggggacactgtctagatctggggaccctcccaagctctcagagctttggaaggaaggtccctgcagggaaactgtgtgtgtttcttcaacagtgtatcctcagtgcctagcacatggtaagtgttccataaacagctgttgaagagactggatggataactgaatgaatggatgcttccatgggcaatgacacactaatctgaaaagccctgtatcaatgaaagaatcacttaatagtttaacttttccctcatccttcagaacacagatggcatgccatcttcccttcaaatctcttcccagtgccccacacagaagaggcacacttggacactggtgtctgatggac

SEQ ID NO: 592 - DNA, 402 bp, Homo sapiens
agaagacagcacattcctactgagctctatatggagagctgcagtcatgggggacactgtctagatctggggaccctcccaagctctcagagctttggaaggaaggtccctgcagggaaactgtgtgtgtttcttcaacagtgtatcctcagtgcctagcacatggtaagtgttccataaacagctgttgaagagacggagtggataactgaatgaatggatgcttccatgggcaatgacacactaatctgaaaagccctgtatcaatgaaagaatcacttaatagtttaacttttccctcatccttcagaacacagatggcatgccatcttcccttcaaatctcttcccagtgccccacacagaagaggcacacttggacactggtgtctgatggacccaa

SEQ ID NO: 593 - DNA, 402 bp, Homo sapiens
ccacacagaagaggcacacttggacactggtgtctgatggacccaagttcacagcctgtctctggtcatcaggtatcatgaccttgggcaagaagcttaactctctgagcctcagtttccccttctgtcccccagggaaaatgagtcctgcccctcctaagggaggtatgagatgtaagaccccgaaggacacaaaggttctgccaggagccttcaggtaggaggcaggtaaggaggtctgctagattggaatgagtttctggaaggccccaaggagctcaaaatcagacctggggtgaaggtgtcttgaccaaaatgagacccatcaaagaagcctggatgaaggtgcccacagcatccatcagtgccaaaaacagaaacactttagcccaggatacaagg

SEQ ID NO: 594 - DNA, 402 bp, Homo sapiens
gggaccttaataaacttcttgccttcttggtacctttgccaaacaatctgatgaggagaatattgagtcatggtgccagggaaaattagcatattctgcaaattcctggcactgttaacactggattctgtccacctttagaaatcctcagatcactatgtcagcatcccccaatcacagctctccaacttcaaggagggattgaggggtctgaagaaggagagagaggcaacagagccagaaacccttcagaagatgccaagagcaaggtttggacccatagtccaccacttactaacttcaagagtgttatgagctacaaacttctcagtctccgttgactcatctcaaaaatggaagtaaaattatttaccatgcaatatgttgtcaaaatgcattggg

SEQ ID NO: 595 - DNA, 402 bp, Homo sapiens
attgggtttagttcatagcaggtgctcaaagaatatcagttccacttcccttgtccctagagagccttgtagtggatgttgatgtgtcttccaacacatgcaccaacctttccctgtcctgtagcagttgagatggaatcatcccactcccagctccaggaataggctctgatgggcttgaacccagcagcttaattccacttggttctctaggccttcatcattagtacaggaaaggcacttgacctaaattagttcgataagatttaagctcagaaatctggtttgttggatggagaaagagatgctttctttctctctggaaggagtttattgcaaaagtaagggctggggctgctacagccattgtgctaccatgagggaactagccatgataacaaa

SEQ ID NO: 596 - DNA, 402 bp, Homo sapiens
tttattgcaaaagtaagggctggggctgctacagccattgtgctaccatgagggaactagccatgataacaaaacttgcctggggaggggctacgcatcacagaaaatgatgccaaagtcctgctcaaactgtgcctgatgcctgcctgatctatggacttcttagttccatgtaatggattctctctatttttaaagccagtatcaggttgaatttttggagaaataaaacaaaaagcatcttgactaatttaaaaaatcttctttgggtattcaaccctcctaaactcacccccaaatccactgggagcatgtcaagatttttgtgagccgatttaggagatgcaaattcatttgccttaattggatctccaggaaatgacttctgccccctcttaaatc

SEQ ID NO: 597 - DNA, 402 bp, Homo sapiens
gctcaaactgtgcctgatgcctgcctgatctatggacttcttagttccatgtaatggattctctctatttttaaagccgtatcaggttgaatttttggagaaataaaacaaaaagcatcttgactaatttaaaaaatcttctttgggtattcaaccctcctaaactcacccccaaatccactgggagcatgtcaagatttcttgtgagccgatttaggagatgcaaattcatttgccttaattggatctccaggaaatgacttctgccccctcttaaatcatttaaagctcaaagaggcatgagggccctccccaaggatgcaggtatcctcttgactgacagcctgtatgctctgcttccaggatccttccatctcctccctttactgagggagtctgcta

SEQ ID NO: 598 - DNA, 402 bp, Homo sapiens
tccaggaaatgacttctgccccctcttaaatcatttaaagctcaaagaggcatgagggccctccccaaggatgcaggtatcctcttgactgacagcctgtatgctctgcttccaggatccttccatctcctccctttactgagggagtctgctatgtgttagaggtgtccatcactggtcacactgggaagctgtggcagcggaagctggagaaaaagcaagataggccccagaaagaacaccaactccagactcagggagactcaggccagaatcctagctcaacttcttccaagctcccaaagtcacactcttttctctgagcctcgattttcccatctgcaaaatggggatactaagggtcacctagctgggctgccctggagattccaagacattagg

SEQ ID NO: 599 - DNA, 402 bp, Homo sapiens
taaatcatttaaagctcaaagaggcatgagggccctccccaaggatgcaggtatcctcttgactgacagcctgtatgctctgcttccaggatccttccatctcctccctttactgagggagtctgctatgtgttagaggtgtccatcactggtcacactgggaagctgtggcagggaagctggagaaaaagcaagataggcgcccagaaagaacaccaactccagactcagggagactcaggccagaatcctagctcaacttcttccaagctcccaaagtcacactcttttctctgagcctcgattttcccatctgcaaaatggggatactaagggtcacctagctgggctgccctggagattccaagacattaggcatagaaacagtctggcctagaccct

SEQ ID NO: 600 - DNA, 402 bp, Homo sapiens
tcctccctttactgagggagtctgctatgtgttagaggtgtccatcactggtcacactgggaagctgtggcagggaagctggagaaaaagcaagataggccccagaaagaacaccaactccagactcagggagactcaggccagaatcctagctcaacttcttccaagctcccaaagtcacactcttttctctgagcctcagattttcccatctgcaaaatggggatactaagggtcacctagctgggctgccctggagattccaagacattaggcatagaaacagtctggcctagaccctgtaggccagtaggcatttgatcaatggcagctgtggttgagatttttatcatcattatggctgcccttcctgctttccagggctagtgtagatctaagatt

SEQ ID NO: 601 - DNA, 402 bp, Homo sapiens
acctaatgcggcggctgatctgacaggagcggagctcaggcggtaatgcttgctcgccagctcacctgctgtgcagccggggtcctaacaggccacagacccatccgtggcccaggggattggcgacccctgtctttttttttttcttttttttgagatggagtttcgctcttgttgcccaggctggagtgcaatggcacagatctcgactcttcaacctccgcctcctgggttcaagccattctcctccctcagcctcccaagtagctgggattacaggcacccgccaccatacctggctaatttttgtatttttagtagagatggggtttctccatgttggtcaggctggtcttgaactcccgacctcaagtgatccgcccacctcagcctcccaaagtg

SEQ ID NO: 602 - DNA, 402 bp, Homo sapiens
ccacagacccatccgtggcccaggggattggcgacccctgtctttttttttttcttttttttgagatggagtttcgctcttgttgcccaggctggagtgcaatggcacgatctcgactcttcaacctccgcctcctgggttcaagccattctcctccctcagcctcccaagtagctgggattacaggcacccgccaccatagcctggctaatttttgtatttttagtagagatggggtttctccatgttggtcaggctggtcttgaactcccgacctcaagtgatccgcccacctcagcctcccaaagtgctgggattacaggcgtgagccaccacgacctgcccggggacccctgtcttaaaccaccccagcctgtgatactttgttatggtgaccctaag

SEQ ID NO: 603 - DNA, 402 bp, Homo sapiens
agtttcgctcttgttgcccaggctggagtgcaatggcacgatctcgactcttcaacctccgcctcctgggttcaagccattctcctccctcagcctcccaagtagctgggattacaggcacccgccaccatacctggctaatttttgtatttttagtagagatggggtttctccatgttggtcaggctggtcttgaactcctcgacctcaagtgatccgcccacctcagcctcccaaagtgctgggattacaggcgtgagccaccacgacctgcccggggacccctgtcttaaaccaccccagcctgtgatactttgttatggtgaccctaagaggcaaatacaccctcctttccccaacctctcccctcagacgaaaccgatgcgaaaagtgcttcatgaa

SEQ ID NO: 604 - DNA, 402 bp, Homo sapiens
ttggtcaggctggtcttgaactcccgacctcaagtgatccgcccacctcagcctcccaaagtgctgggattacaggcgtgagccaccacgacctgcccggggacccctgtcttaaaccaccccagcctgtgatactttgttatggtgaccctaagaggcaaatacaccctcctttccccaacctctcccctcagacgaaacgcgatgcgaaaagtgcttcatgaagtttcaggtaaagaagtctgggacgaaaagggatagtgaggatggcgggaggggctgaactccaaatgggcttatcaaggctctgcaaaatggcgtgacggcgctgcccccttctggtggcctgaagactaacgcacatgatgtcaagtgcggggcccaagtactcaggaaaaggtt

SEQ ID NO: 605 - DNA, 402 bp, Homo sapiens
gtcttgaactcccgacctcaagtgatccgcccacctcagcctcccaaagtgctgggattacaggcgtgagccaccacgacctgcccggggacccctgtcttaaaccaccccagcctgtgatactttgttatggtgaccctaagaggcaaatacaccctcctttccccaacctctcccctcagacgaaaccgatgcgaaaacgtgcttcatgaagtttcaggtaaagaagtctgggacgaaaagggatagtgaggatggcgggaggggctgaactccaaatgggcttatcaaggctctgcaaaatggcgtgacggcgctgcccccttctggtggcctgaagactaacgcacatgatgtcaagtgcggggcccaagtactcaggaaaaggttctcatttggaca

SEQ ID NO: 606 - DNA, 402 bp, Homo sapiens
cctcaagtgatccgcccacctcagcctcccaaagtgctgggattacaggcgtgagccaccacgacctgcccggggacccctgtcttaaaccaccccagcctgtgatactttgttatggtgaccctaagaggcaaatacaccctcctttccccaacctctcccctcagacgaaaccgatgcgaaaagtgcttcatgaagttctcaggtaaagaagtctgggacgaaaagggatagtgaggatggcgggaggggctgaactccaaatgggcttatcaaggctctgcaaaatggcgtgacggcgctgcccccttctggtggcctgaagactaacgcacatgatgtcaagtgcggggcccaagtactcaggaaaaggttctcatttggacactgggaggtcttaca

SEQ ID NO: 607 - DNA, 402 bp, Homo sapiens
cccacctcagcctcccaaagtgctgggattacaggcgtgagccaccacgacctgcccggggacccctgtcttaaaccaccccagcctgtgatactttgttatggtgaccctaagaggcaaatacaccctcctttccccaacctctcccctcagacgaaaccgatgcgaaaagtgcttcatgaagtttcaggtaaagaagtcgtgggacgaaaagggatagtgaggatggcgggaggggctgaactccaaatgggcttatcaaggctctgcaaaatggcgtgacggcgctgcccccttctggtggcctgaagactaacgcacatgatgtcaagtgcggggcccaagtactcaggaaaaggttctcatttggacactgggaggtcttacattgggggccctgag

SEQ ID NO: 608 - DNA, 402 bp, Homo sapiens
gcgtgagccaccacgacctgcccggggacccctgtcttaaaccaccccagcctgtgatactttgttatggtgaccctaagaggcaaatacaccctcctttccccaacctctcccctcagacgaaaccgatgcgaaaagtgcttcatgaagtttcaggtaaagaagtctgggacgaaaagggatagtgaggatggcgggagagggctgaactccaaatgggcttatcaaggctctgcaaaatggcgtgacggcgctgcccccttctggtggcctgaagactaacgcacatgatgtcaagtgcggggcccaagtactcaggaaaaggttctcatttggacactgggaggtcttacattgggggccctgagcctccagcccttccaaatctattctcagcaggag

SEQ ID NO: 609 - DNA, 402 bp, Homo sapiens
tttccccaacctctcccctcagacgaaaccgatgcgaaaagtgcttcatgaagtttcaggtaaagaagtctgggacgaaaagggatagtgaggatggcgggaggggctgaactccaaatgggcttatcaaggctctgcaaaatggcgtgacggcgctgcccccttctggtggcctgaagactaacgcacatgatgtcaaggtgcggggcccaagtactcaggaaaaggttctcatttggacactgggaggtcttacattgggggccctgagcctccagcccttccaaatctattctcagcaggagctcagccacacctgtgtcccagaactgaggccaggcccagccttcactccacgcccagccagccccaaggaaccgactccctgaggctctatgctcc

SEQ ID NO: 610 - DNA, 402 bp, Homo sapiens
gcgtgacggcgctgcccccttctggtggcctgaagactaacgcacatgatgtcaagtgcggggcccaagtactcaggaaaaggttctcatttggacactgggaggtcttacattgggggccctgagcctccagcccttccaaatctattctcagcaggagctcagccacacctgtgtcccagaactgaggccaggcccagcgcttcactccacgcccagccagccccaaggaaccgactccctgaggctctatgctccctgcctccagtggccccgtgtctgggaaatagtggccctggcctgatgccctgacctgggcaatccatcccctggtcctctcagctcccgggcccaggttttctgggctactttaaccagggcaaactcattcctcgagtacaa

SEQ ID NO: 611 - DNA, 402 bp, Homo sapiens
gaggtcttacattgggggccctgagcctccagcccttccaaatctattctcagcaggagctcagccacacctgtgtcccagaactgaggccaggcccagccttcactccacgcccagccagccccaaggaaccgactccctgaggctctatgctccctgcctccagtggccccgtgtctgggaaatagtggccctggcctagatgccctgacctgggcaatccatcccctggtcctctcagctcccgggcccaggttttctgggctactttaaccagggcaaactcattcctcgagtacaaaataaaagattcgaacagcataatcaaataggtcatacccataaatcaacacatttgagcacctattttgttgttctttcactaatccaaaccatatttat

SEQ ID NO: 612 - DNA, 402 bp, Homo sapiens
catcccctggtcctctcagctcccgggcccaggttttctgggctactttaaccagggcaaactcattcctcgagtacaaaataaaagattcgaacagcataatcaaataggtcatacccataaatcaacacatttgagcacctattttgttgttctttcactaatccaaaccatatttattgagcatctactatgtgccagttctccagtagccattctaggtgcaggggatacagcagagaccttgaaaaaaggaacagtctctgatcttgctgagcttagagtcaagtggaggtgaggaggaaggaaatgaattaacaactaagtgaagcagaaggtaaccaattgattgactgacgaaggggtacaaacaacaaacaccttcctttctccaaactctat

SEQ ID NO: 613 - DNA, 402 bp, Homo sapiens
tcactaatccaaaccatatttattgagcatctactatgtgccattctccagtagccattctaggtgcaggggatacagcagagaccttgaaaaaaggaacagtctctgatcttgctgagcttagagtcaagtggaggtgaggaggaaggaaatgaattaacaactaagtgaagcagaaggtaaccaattgattgactgacagaaggggtacaaacaacaaacaccttcctttctccaaactctatctttaactgtattctctcgttttccttcctctccattttacaatcattttacaacatctctggctattctcctatatttctgatcacttcggttctcatcacaataataatttcagttttcaagcattggaaagtcccatccaattaaaatgtcaat

SEQ ID NO: 614 - DNA, 402 bp, Homo sapiens
catctactatgtgccattctccagtagccattctaggtgcaggggatacagcagagaccttgaaaaaaggaacagtctctgatcttgctgagcttagagtcaagtggaggtgaggaggaaggaaatgaattaacaactaagtgaagcagaaggtaaccaattgattgactgacgaaggggtacaaacaacaaacaccttcactttctccaaactctatctttaactgtattctctcgttttccttcctctccattttacaatcattttacaacatctctggctattctcctatatttctgatcacttcggttctcatcacaataataatttcagttttcaagcattggaaagtcccatccaattaaaatgtcaatctcacacgcagtttaaacgtttcgcct

SEQ ID NO: 615 - DNA, 402 bp, Homo sapiens
attctccagtagccattctaggtgcaggggatacagcagagaccttgaaaaaaggaacagtctctgatcttgctgagcttagagtcaagtggaggtgaggaggaaggaaatgaattaacaactaagtgaagcagaaggtaaccaattgattgactgacgaaggggtacaaacaacaaacaccttcctttctccaaactctagtctttaactgtattctctcgttttccttcctctccattttacaatcattttacaacatctctggctattctcctatatttctgatcacttcggttctcatcacaataataatttcagttttcaagcattggaaagtcccatccaattaaaatgtcaatctcacacgcagtttaaacgtttcgcctgcccgtgagctcaga

SEQ ID NO: 616 - DNA, 402 bp, Homo sapiens
tcttgtgtggaggggaggagaggagaggggaggggaggagaggaaaggagaccggggaggtggggggggagaggggaggggaggagaggggaggggagtgggggagaaggggagaaaagcgcagctggcttcctcactctcctttccttcctcaccatccttaccctggcccagggcaggaggaggattggcagagtagaaggcagggtcttctgtcttagctgggcctgttggtgactttctgttggccaacatgggctgactggaatgttctccagcatggcacatggtcatccagatgcaggctcttccctggggcactatagcagagagggctctcttccagtctattgcagatggatgccctcgtgagctgagttttgatgaacatcccatgtcccc

SEQ ID NO: 617 - DNA, 402 bp, Homo sapiens
caacatgggctgactggaatgttctccagcatggcacatggtcatccagatgcaggctcttccctggggcactatagcagagagggctctcttccagtctattgcagatggatgccctcgtgagctgagttttgatgaacatcccatgtccccagccaccccattcagagcctctttctactctggtcctctggtcccagcgagcagccctctgggtactgaggggagggcatctcacccaagccccttaaacctgctcaccttcttcagagcccacgtggccgcaggaaagtcacaaacccttgtgctcccacagggcacacgtgtgcacacgtgtgcagctaccttctctctagttggtacctgaggctgcctcctggattttccagtctctgtgttccc

SEQ ID NO: 618 - DNA, 402 bp, Homo sapiens
tggctgcggcgtaagctaccagcatccccttctcatgggcaccctcatctccggctccccatcgctgggctgtgacctgcgggggcgcccctctatggaagggaaggagaaaaattcacagtgctatctactcctctgaatgcactcccaccaatttccttggaaatttctagctttcactgacatatctgggatggggcaggtggtcacaaaatcaatcccactttccctcggctagtcttacaagcacccaacagctctattcagaatacagggctgcccagctacttcccattcattatccccaggttgcaagctttagtcaaaacccagaggcagcagggtgtctggttccacctgctgttaggatgatttcaggagtgcaaagtgttagaaacgcgg

SEQ ID NO: 619 - DNA, 402 bp, Homo sapiens
cggtggtcacaaaatcaatcccactttccctcggctagtcttacaagcacccaacagctctattcagaatacagggctgcccagctacttcccattcattatccccaggttgcaagctttagtcaaaacccagaggcagcagggtgtctggttccacctgctgttaggatgatttcaggagtgcaaagtgttagaaacgcaggtaaaacatgatgcttagagattaagtgggatggggactgggcagatgatgctgctttggacccagcgagtgaggtgagactgcgacaagacagagccactgagcagtgacctgggggatgggcattgcaggcaaggcagaaccccaagtgggaacaacctcactgggcttagcaaaactaaagaggcccaaagtatact

SEQ ID NO: 620 - DNA, 402 bp, Homo sapiens
tcaatcccactttccctcggctagtcttacaagcacccaacagctctattcagaatacagggctgcccagctacttcccattcattatccccaggttgcaagctttagtcaaaacccagaggcagcagggtgtctggttccacctgctgttaggatgatttcaggagtgcaaagtgttagaaacgcggtaaaacatgatgctttagagattaagtgggatggggactgggcagatgatgctgctttggacccagcgagtgaggtgagactgcgacaagacagagccactgagcagtgacctgggggatgggcattgcaggcaaggcagaaccccaagtgggaacaacctcactgggcttagcaaaactaaagaggcccaaagtatactgagcgatgaggtga

SEQ ID NO: 621 - DNA, 402 bp, Homo sapiens
tgggatggggactgggcagatgatgctgctttggacccagcgagtgaggtgagactgcgacaagacagagccactgagcagtgacctgggggatgggcattgcaggcaaggcagaaccccaagtgggaacaacctcactgggcttagcaaaactaaagaggcccaaagtatactgagcgatgaggtgagtggcgtgggatagaggttggagaggaggctggaaccagaccctgcagggccttgcaggtgatgggaaggagtttggaaggtgctggaaggtttgaagcagaggagggatatgatcatgcctgtagctgctatgtagaacaactgtatgcatgccaggcctgtgccacgcatgctctaatcattactggctttaacccttgcactaacgttgtc

SEQ ID NO: 622 - DNA, 402 bp, Homo sapiens
ctcactgggcttagcaaaactaaagaggcccaaagtatactgagcgatgaggtgagtggcgtgggataaggttggagaggaggctggaaccagaccctgcagggccttgcaggtgatgggaaggagtttggaaggtgctggaaggtttgaagcagaggagggatatgatcatgcctgtagctgctatgtagaacaactgtagtgcatgccaggcctgtgccacgcatgctctaatcattactggctttaacccttgcactaacgttgtcatgcaggtaggagcatctgcacccagcaaatggaaactgaagctcaggaatattcagtcacttgtccaaggctccccagctgttaggtgctaaggctggattcaatccaggacttgcagactccagtatcttg

SEQ ID NO: 623 - DNA, 402 bp, Homo sapiens
gcagggccttgcaggtgatgggaaggagtttggaaggtgctggaaggtttgaagcagaggagggatatgatcatgcctgtagctgctatgtagaacaactgtatgcatgccaggcctgtgccacgcatgctctaatcattactggctttaacccttgcactaacgttgtcatgcaggtaggagcatctgcacccagcaaactggaaactgaagctcaggaatattcagtcacttgtccaaggctccccagctgttaggtgctaaggctggattcaatccaggacttgcagactccagtatcttggcttttctaacgagagtgtgctagctttctaatgggggtggggaaggcagtctgcccccctcccatggcaccgtgagcaggtgtcactgctccagcca

SEQ ID NO: 624 - DNA, 402 bp, Homo sapiens
aacaactgtatgcatgccaggcctgtgccacgcatgctctaatcattactggctttaacccttgcactaacgttgtcatgcaggtaggagcatctgcacccagcaaatggaaactgaagctcaggaatattcagtcacttgtccaaggctccccagctgttaggtgctaaggctggattcaatccaggacttgcagactcctagtatcttggcttttctaacgagagtgtgctagctttctaatgggggtggggaaggcagtctgcccccctcccatggcaccgtgagcaggtgtcactgctccagccagtacgcctggacaccgactaggaaggagtatgtgctactaggagggatggtctgggctgactctttgaagttgacaaggagttgcataatccc

SEQ ID NO: 625 - DNA, 402 bp, Homo sapiens
ccttgcactaacgttgtcatgcaggtaggagcatctgcacccagcaaatggaaactgaagctcaggaatattcagtcacttgtccaaggctccccagctgttaggtgctaaggctggattcaatccaggacttgcagactccagtatcttggcttttctaacgagagtgtgctagctttctaatgggggtggggaaggcagttctgcccccctcccatggcaccgtgagcaggtgtcactgctccagccagtacgcctggacaccgactaggaaggagtatgtgctactaggagggatggtctgggctgactctttgaagttgacaaggagttgcataatcccagctaataattatgctggaccaggggcagagacattactccaagggtgaccaggtgtgg

SEQ ID NO: 626 - DNA, 402 bp, Homo sapiens
agtcacttgtccaaggctccccagctgttaggtgctaaggctggattcaatccaggacttgcagactccagtatcttggcttttctaacgagagtgtgctagctttctaatgggggtggggaaggcagtctgcccccctcccatggcaccgtgagcaggtgtcactgctccagccagtacgcctggacaccgactaggaaaggagtatgtgctactaggagggatggtctgggctgactctttgaagttgacaaggagttgcataatcccagctaataattatgctggaccaggggcagagacattactccaagggtgaccaggtgtggagaagaggctgctgactccggggccccaggacctggcccccaggtctcattgcccgagtgctgccccagaagg

SEQ ID NO: 627 - DNA, 402 bp, Homo sapiens
ggatggtctgggctgactctttgaagttgacaaggagttgcataatcccagctaataattatgctggaccaggggcagagacattactccaagggtgaccaggtgtggagaagaggctgctgactccggggccccaggacctggcccccaggtctcattgcccgagtgctgccccagaaggagtagaagctggagctgtcctgggccacagccgaggctgggtgaatgctgcagtgaggctgccgcacaagttgcgtgttgtgacatttgtcttctggaggggattgggatgggctacttcagcatttaaaaacccctactaggtctgagaaatcccctcagcttatgagcctgggtgggcagcaggccttctcaagaagcccagaaggccagatgctcact

SEQ ID NO: 628 - DNA, 402 bp, Homo sapiens
gaggggattgggatgggctacttcagcatttaaaaacccctactaggtctgagaaatcccctcagcttatgagcctgggtgggcagcaggccttctcaagaagcccagaaggccagatgctcacttcccaggctctcttgcggctgagctgagagcaggcacctgaggcctggcaagtgtgacagctggtgacacagacaagacagggacagggagatgggactgtgcctgcagcggtagccctggccggtgttcagtggggccagcatccgtgtctttcctgggggccagtgggggccgtggctctgacgatgcatccctcccccacgttttttctcttcttgtcttggactttgcagggagcactctgcttttgggaacaggagctgggtctctggccat

SEQ ID NO: 629 - DNA, 402 bp, Homo sapiens
ggcaagtgtgacagctggtgacacagacagacagggacagggagatgggactgtgcctgcagcggtagccctggccggtgttcagtggggccagcatccgtgtctttcctgggggccagtgggggccgtggctctgacgatgcatccctcccccacgttttttctcttcttgtcttggactttgcagggagcactctgctgtttgggaacaggagctgggtctctggccattctccgcagcccctcaccattcactcagtggctctcaaaaaatagaacctggggcaaagctgttcttggccccaaacaacatgaggaaaaataaataaataatgtacctggtaactgagagagttccctctgcatcttgggctctttcaatgagatgtcctctgcctgcag

SEQ ID NO: 630 - DNA, 402 bp, Homo sapiens
gacagggagatgggactgtgcctgcagcggtagccctggccggtgttcagtggggccagcatccgtgtctttcctgggggccagtgggggccgtggctctgacgatgcatccctcccccacgttttttctcttcttgtcttggactttgcagggagcactctgcttttgggaacaggagctgggtctctggccattctccagcagcccctcaccattcactcagtggctctcaaaaaatagaacctggggcaaagctgttcttggccccaaacaacatgaggaaaaataaataaataatgtacctggtaactgagagagttccctctgcatcttgggctctttcaatgagatgtcctctgcctgcagcaagccccaagggcttccctcaccaggaccagcac

SEQ ID NO: 631 - DNA, 402 bp, Homo sapiens
agtggggccagcatccgtgtctttcctgggggccagtgggggccgtggctctgacgatgcatccctcccccacgttttttctcttcttgtcttggactttgcagggagcactctgcttttgggaacaggagctgggtctctggccattctccgcagcccctcaccattcactcagtggctctcaaaaaatagaacctgggagcaaagctgttcttggccccaaacaacatgaggaaaaataaataaataatgtacctggtaactgagagagttccctctgcatcttgggctctttcaatgagatgtcctctgcctgcagcaagccccaagggcttccctcaccaggaccagcaccctggtttgcctgaccccacacctgccaatgccggggcaagaatgtcc

SEQ ID NO: 632 - DNA, 402 bp, Homo sapiens
ctccagggccaccggccactgctcaggaccctggctgaccccacagatgcggagtgcctgagatggctcatgggtgacccccaggcatctggcaaaggtcacaatggctgtttggcttgaagacagcccttgcaagatctgttttgagccaacctgtggcatttagccctccctgggtgacaaataaaaaggctgaggctctgtaggagccaaggtgggagtccccatctacccccaccctctcagcccaccagggcccagactggggaactgctcctgcttcgagggacagggctgaagaggagaggggcttggggctccccttgatcccaaagctccagggaccccaaagaaacgtatcagcagcatgagaatatcgggtgacctctctctctagtaaat

SEQ ID NO: 633 - DNA, 402 bp, Homo sapiens
aggcatctggcaaaggtcacaatggctgtttggcttgaagacagcccttgcaagatctgttttgagccaacctgtggcatttagccctccctgggtgacaaataaaaaggctgaggcttgtaggagccaaggtgggagtccccatctacccccaccctctcagcccaccagggcccagactggggaactgctcctgcttcagagggacagggctgaagaggagaggggcttggggctccccttgatcccaaagctccagggaccccaaagaaacgtatcagcagcatgagaatatcgggtgacctctctctctagtaaatgtcaaaacttttaaccaaaatgccttcatcccccagcgccaggcctgagctaatctcataggtgtcaggactgggagcctgg

SEQ ID NO: 634 - DNA, 402 bp, Homo sapiens
gggaactgctcctgcttcgagggacagggctgaagaggagaggggcttggggctccccttgatcccaaagctccagggaccccaaagaaacgtatcagcagcatgagaatatcgggtgacctctctctctagtaaatgtcaaaacttttaaccaaaatgccttcatcccccagcgccaggcctgagctaatctcataggtagtcaggactgggagcctggacccctcttccttctgctcctgctttgcagagaagtgagtggggaattcccgcctctgggaattcagagacgaagtgacagagacagcattggaagataagaatgcagccaaagaggtcttcagggtagcgtgtggcctgggcgctgagactattgggcctagcaacttctcaagcagtcta

SEQ ID NO: 635 - DNA, 402 bp, Homo sapiens
agtgacagagacagcattggaagataagaatgcagccaaagaggtcttcagggtagcgtgtggcctgggcgctgagactattgggcctagcaacttctcaagcagtctattaaccacagccggtagccagcttttccccgcccttctcccaggcacacacagccacctccatcaccaaaggtcaggcgaaccacctcccactggctacccccagcctgacttgctttatagaaatcatggcatctcatcctcacaacagcccacactcacagtgaatcttggccattatgacaactggggacactgaggctcggagtggtggaaattctcagaatcacataacaataagtgttaaagtcagaatttcaacttcatctctctaactccaaagggcgtgtgtgt

SEQ ID NO: 636 - DNA, 402 bp, Homo sapiens
gtagccagcttttccccgcccttctcccaggcacacacagccacctccatcaccaaaggtcaggcgaaccacctcccatggctacccccagcctgacttgctttatagaaatcatggcatctcatcctcacaacagcccacactcacagtgaatcttggccattatgacaactggggacactgaggctcggagtggtggaagattctcagaatcacataacaataagtgttaaagtcagaatttcaacttcatctctctaactccaaagggcgtgtgtgtgtgtgtgcgtttctggccataatcatattgtgccctacaagccccagtgaggaatctgctaggaacactggtttggggaaaaaatgtaataaaatatgtgatccagaaggcggccttggtac

SEQ ID NO: 637 - DNA, 402 bp, Homo sapiens
tggtggaaattctcagaatcacataacaataagtgttaaagtcagaatttcaacttcatctctctaactccaaagggcgtgtgtgtgtgtgtgcgtttctggccataatcatattgtgccctacaagccccagtgaggaatctgctaggaacactggtttggggaaaaaatgtaataaaatatgtgatccagaaggcggcctttggtacctgtcataaaccgcagcatggggtactcactatgcctggggtctgggctctgaaggcatgattgaatgatctcactgcaggcctggttgtcctgcgaagacacccgtcaatacatgaatattgacacacaacgctgcagtgcacgcgcttctggcaggggagctgctgcactcgagggcagctcaaggttaat

SEQ ID NO: 638 - DNA, 402 bp, Homo sapiens
aaggcatgattgaatgatctcactgcaggcctggttgtcctgcgaagacacccgtcaatacatgaatattgacacacaacgctgcagtgcacgcgcttctggcaggggagctgctgcactcgagggcagctcaaggttaatttgcagggttcatgtttggagtttctgagcaagtgttgcagctttggcccccagcccccctgaggggagctctggccgtgcatgagggtcagacagaaaatctcctttcctccatccaggcctgcagtctgcagcactgaggtcagcgctggccacaagcccaccctgtgcctcgtcagccccactgagcctctccatctatcatgccacaggctgaccctgaaatgcaaaatcattctgtcctcccgccctccactccca

SEQ ID NO: 639 - DNA, 402 bp, Homo sapiens
ggagctgctgcactcgagggcagctcaaggttaatttgcagggttcatgtttggagtttctgagcaagtgttgcagctttggcccccagccccctgaggggagctctggccgtgcatgagggtcagacagaaaatctcctttcctccatccaggcctgcagtctgcagcactgaggtcagcgctggccacaagcccacccctgtgcctcgtcagccccactgagcctctccatctatcatgccacaggctgaccctgaaatgcaaaatcattctgtcctcccgccctccactcccacctcgcacatctatggatttgctgttcagaaaacatctgttccctccttcgcccctgacatacgcatcgatctcatgctagcccagctgcctaagctcaccactct

SEQ ID NO: 640 - DNA, 402 bp, Homo sapiens
gtcagccccactgagcctctccatctatcatgccacaggctgaccctgaaatgcaaaatcattctgtcctcccgccctccactcccacctcgcacatctatggatttgctgttcagaaaacatctgttccctccttcgcccctgacatacgcatcgatctcatgctagcccagctgcctaagctcaccactctgggagacacgactctcagtcctcatcagacagagatgtagggggctgtaagggacggggtgcaggtagggcctgaggattccgacaaggtgagccatgggcaggggcattgttcatgcagggacctcctggccaaggtcctacgtcaaggttagaaggaaagagtaaatgatcggataggctaagacagcaactcagcaggccaaggga

SEQ ID NO: 641 - DNA, 402 bp, Homo sapiens
tcctcatcagacagagatgtagggggctgtaagggacggggtgcaggtagggcctgaggattccgacaaggtgagccatgggcaggggcattgttcatgcagggacctcctggccaaggtcctacgtcaaggttagaaggaaagagtaaatgatcggataggctaagacagcaactcagcaggccaagggactcctccccctaggacctgctccacccttagaggggtcccggacagccaagccctgatggagttggtcagcaaccaaccagccctggggccaaggcctgcagaagcagagaggaggggtctcaggcaggccagaggtgctagctgggatgcctgggtcccccaccccaccccagcacactgtcctttctccaggtgctcagttagattgag

SEQ ID NO: 642 - DNA, 402 bp, Homo sapiens
aggaaagagtaaatgatcggataggctaagacagcaactcagcaggccaagggactcctcccccaggacctgctccacccttagaggggtcccggacagccaagccctgatggagttggtcagcaaccaaccagccctggggccaaggcctgcagaagcagagaggaggggtctcaggcaggccagaggtgctagctgggagtgcctgggtcccccaccccaccccagcacactgtcctttctccaggtgctcagttagattgagctgggtcccatcttgggcctttgctggtccctccctagaaagtctgccccctccccctgcagggtggcatcagcattcaggcctggccctgacgccctcctctctgggccaccttcacctccacaaccccggcacca

SEQ ID NO: 643 - DNA, 402 bp, Homo sapiens
cttagaggggtcccggacagccaagccctgatggagttggtcagcaaccaaccagccctggggccaaggcctgcagaagcagagaggaggggtctcaggcaggccagaggtgctagctgggatgcctgggtcccccaccccaccccagcacactgtcctttctccaggtgctcagttagattgagctgggtcccatcttgaggcctttgctggtccctccctagaaagtctgccccctccccctgcagggtggcatcagcattcaggcctggccctgacgccctcctctctgggccaccttcacctccacaaccccggcaccagcacccatccccaccacatccccagcacgcagcatctagtaagggcaccaaatgcatgcccagacatatgagtgaaatg

SEQ ID NO: 644 - DNA, 402 bp, Homo sapiens
gaaattaaccctactccatccagcccatcctaaggcagggacttggacctgttcctcttgatggggctggggctgaggcgggcaaggcaggcaagtgctgaacagttggcaacattgcccatcccgtctccctgcaccaggctgggcctggggtgagggggtgggggccggggtagctgggctcctccagcaaagagcaggtactgagtccctggtgactattaggtaaaaggtccctgacaattttgaggggccagatgccaactcgagggatacagagaagatctaggcacagtctttccccaccatgtcagacaaaaaggttagatacaggacctgatatgttataaaactcaatcaatatttacttagtgaataaatggacggatggatggatggatg

SEQ ID NO: 645 - DNA, 402 bp, Homo sapiens
agagcaggactgagtccctggtgactattaggtaaaaggtccctgacaattttgaggggccagatgccaactcgagggatacagagaagatctaggcacagtctttccccaccatgtcagacaaaaaggttagatacaggacctgatatgttataaaactcaatcaatatttacttagtgaataaatggacggatggatggtatggatgcattaggcagccaagtgggcagcaccgatgacttaatgtactgagtgctccgactccagcaacatgcattcattgttcctactgtgtgccagtgaacaagagcaatgaactcaatgacttctgcccagggtgggccagggaaccagggaagactctccaaaaaggcagcatttgggctgggacgtacagatga

SEQ ID NO: 646 - DNA, 402 bp, Homo sapiens
taggcagccaagtgggcagcaccgatgacttaatgtactgagtgctccgactccagcaacatgcattcattgttcctactgtgtgccagtgaacaagagcaatgaactcaatgacttctgcccagggtgggccagggaaccagggaagactctccaaaaaggcagcatttgggctgggacgtacagatgagtagggggtcagagtgtgtcgttatgtcgctggagcccagaggcgtccatcaggacttgggggagggcagatgaaagggccttactgcctaacttggagccactgtatgtttcaaaacaaaggagagagaggatcctgggaaagagaaagggtactctaggcagaggatgtgaatgggcacagcacaggtgagaacatcaagaccaggggtc

SEQ ID NO: 647 - DNA, 402 bp, Homo sapiens
attcattgttcctactgtgtgccagtgaacaagagcaatgaactcaatgacttctgcccagggtgggccagggaaccagggaagactctccaaaaaggcagcatttgggctgggacgtacagatgagtagggggtcgagtgtgtcgttatgtcgctggagcccagaggcgtccatcaggacttgggggagggcagatgaaaggggccttactgcctaacttggagccactgtatgtttcaaaacaaaggagagagaggatcctgggaaagagaaagggtactctaggcagaggatgtgaatgggcacagcacaggtgagaacatcaagaccaggggtcagggaatctactggtaaacaattgtaccccaagggagcaatcacagcctctccatccacaggga

SEQ ID NO: 648 - DNA, 402 bp, Homo sapiens
cttctgcccagggtgggccagggaaccagggaagactctccaaaaaggcagcatttgggctgggacgtacagatgagtagggggtcgagtgtgtcgttatgtcgctggagcccagaggcgtccatcaggacttgggggagggcagatgaaagggccttactgcctaacttggagccactgtatgtttcaaaacaaaggagacgagaggatcctgggaaagagaaagggtactctaggcagaggatgtgaatgggcacagcacaggtgagaacatcaagaccaggggtcagggaatctactggtaaacaattgtaccccaagggagcaatcacagcctctccatccacagggaaatgcctggtggggaggaatgggaggaaagaaacagattgcatgactgtg

SEQ ID NO: 649 - DNA, 402 bp, Homo sapiens
tcttccaggtccagaaactgaggctcagagggagactttctgatgagtgcagcgtgcagataagagcatctccaaagctacctccttccccagtcacaccagggcataagcaactgataacagctgtcagcacgggacagtggagggaacactaggttaggaataagggtacgaggcttgagtacagattgtcaatgactctagtgtgtgaacttggtcaggtgactccaaccagatgacttccttctctgagcttctgttccctcctctatgaatggggacaatcactcagcttcacaaaacaatggctgcgaaattgcctggtacaagagagagaacttccagtgtgtaggggctgttgtcctaactgcccagccccctagataggtagttatgtcatct

SEQ ID NO: 650 - DNA, 402 bp, Homo sapiens
taggtgctcaggaaaggctgagggtgcagctgctgtccacacacatggtaccactgccccaggaaggggcttcaggaaccaagagcaattctgagcactggtgactggactctgccattctccatttcaaacgctttttgaaagcagctccagacccaagcaggagagcaggaggcaaaagaaacgcaggggctttcccgagatggaattttagaaacacacagaattgtctcctgcacagaagggaagctgtcttccacagcacagagccaccaggccccagactgctggcttatgtatttgtcattgctcatcatgaatggatgccaggaaagtctctttgtgatgggggcacaacccctcaaatctcctcccctccagatgccatccactggagctgag

SEQ ID NO: 651 - DNA, 402 bp, Homo sapiens
aaaggggcccacgcttgaggccgctcagctctgagtcctcgccggccacagaggaccttcgtgcctgtcctctgtcctcctgcccagtccccaggccaggctcagctggagttggggagcagaaaaacacgcatctgaatcaaggctctcggagcctttgcttctgcctccaagaggcgagggaaaatgaatacccaggcagagcgagcaagagagaccctcagaaaaccccagatgcccctggaatcaagccctgtcccaccaacgccacgtggattgacaggctattagtcttcctgtaattaggattctcgcctcaaatcttgtatctttttcccccagaagattctcctccagccttcaccactgccccctggcgcttccttgcaaggcttttgaaga

SEQ ID NO: 652 - DNA, 402 bp, Homo sapiens
gtgtggggcgccacctggcgtccagaagaggtaagacaggcggagcgggaccctccgaagtgggaggaggacgctggtcaggggaggaggggaccgcgagagcgagagcggacattctaccaaacacatggacaacacagaagatgaggaaaatgagcagggcagctagtcataggagcaaattttaaaaattaagtgacctgaggtagtcagggggcctcactgagaagtggcttggagtaagacctgaagttggggactggatatgcagatgtctgggaggagagcttttcaggaagaagaatcagccagtgcagaggcctatggcagacccaagcaggaggcaaaagaaacgcagaggctttccaggatggaaaatgaagaatcagccagtgcagagga

SEQ ID NO: 653 - DNA, 402 bp, Homo sapiens
tcccagggagtgtgtgtgtgtaaagagggaagaaaagagcattgagtcccgagccccaggctcttcaatggtaagaggttggcagattaggaaggaccagcaaagactgggatgggaaaccactgaagcaagaggaaggccaggcagatgtgtcctgaaagccaaaaagagaaaggtcatcattaatatgatacattttgctaatttgtttatatgtaagaggagattaatagctcatagcattcccaggcattgctgttaggaattgcagctccaggctggcaacccttaaatcacaaactagattgtcaagaggactgcctggaattccagctctgtaagtaatatgctgtgtggcctcagccaggtcacttcacctctctgggcttctcttgcttccat

SEQ ID NO: 654 - DNA, 402 bp, Homo sapiens
aactagattgtcaagaggactgcctggaattccagctctgtaagtaatatgctgtgtggcctcagccaggtcacttcacctctctgggcttctcttgcttccatatataaatgtaataagaaaatcttttatttattatttatttatttatttttgagacagagactcgctttgtcacccaggctggagggcagtggtgcagatctccactcaccgcaatctccgccttccgggctaaggcaattcttgtgcctcaacctcctgactagctgaaattacaggcacccaccaccacacccagctaatttttgtatttttagtagagacggggtttcatcttgttggccaggcttgtctcaaacacctgacctcaagtgatctgcctgcctcggcctcccaaag

SEQ ID NO: 655 - DNA, 402 bp, Homo sapiens
aagtcagcagtcatcacagaaccatcacaacctgaagccctgtgcatgttgctgtttatttcctgtttacatcacaacctgaagccctgtgcatgtagctgtatactaaccctagagttagtatagcttagttaaactttcatttattgctaaaggtttatcactgctgtctctatcagcctccctgcactgtaagggacagagggggcaggtccagtttctgtcttgtttcaggttttgtctccagccaagataagtatctttgcaaggctctgtttttattctgaaaggaaattaggagctattggagggtatggagtggaaggggacagtcttctgccttggatgtataaaagggatgctgggccacgctgatgggctagaccatggcaggcagagaaa

SEQ ID NO: 656 - DNA, 402 bp, Homo sapiens
ctcagctcctccctctgtccctctgctctattccctcagatctgacggctccatcccataaacgtggcacacacacacctgcctcaaggcctttgctcaggctgttcccactgcctggagcactcttcctgcagacacccacgaggctcattttcctttagtgaggctttcctggccgcctcttccagataacaactctccttctccttccctgccctcctgctcctcctgttcgcgctacataacagactctgtggggccttggtttatgtatttccttctctcccctactgaaatacatgtgagcgatgctggggcaggccgactagaagaagcagactatctgcttcttctccacccttagaatggtgctgggcccagaagaggcatgcagtcgatatt

SEQ ID NO: 657 - DNA, 402 bp, Homo sapiens
acccttagaatggtgctgggcccagaagaggcatgcagtcgatatttgctgaataaatgaatgtcagataaagtggtgtggggactccaggggaaagatttgtcattctccaccctcccagttcagcttaaagcagagaagtgagaggtgcccaaaaaggggtgtgtctggggggtggggggtggggatgttccaagatcctccaaggcctggattttaagcaaggtttgagatgccagcaagagggcctggcattgccagattgatagtctgcatttcagagaaggacaaccccacctctgaccttagcccaagcctcaacagcctgctcaaggagatccacccttagtaggaggaggcagccaggccaggttccagtccctgccaccgcttgccaggtgt

SEQ ID NO: 658 - DNA, 402 bp, Homo sapiens
accctcccagttcagcttaaagcagagaagtgagaggtgcccaaaaaggggtgtgtctggggggtggggggtggggatgttccaagatctccaaggcctggattttaagcaaggtttgagatgccagcaagagggcctggcattgccagattgatagtctgcatttcagagaaggacaaccccacctctgaccttagcccagagcctcaacagcctgctcaaggagatccacccttagtaggaggaggcagccaggccaggttccagtccctgccaccgcttgccaggtgtgtcttgggcagcagttgcctttgctcggtggtcttcagctttgccccctgccaggcacgtgctggcctcctgcctgcatcgtagctcatggagtcctctcagtcacctctg

SEQ ID NO: 659 - DNA, 402 bp, Homo sapiens
agattgatagtctgcatttcagagaaggacaaccccacctctgaccttagcccaagcctcaacagcctgctcaaggagatccacccttagtaggaggaggcagccaggccaggttccagtccctgccaccgcttgccaggtgtgtcttgggcagcagttgcctttgctcggtggtcttcagctttgccccctgccaggcactgtgctggcctcctgcctgcatcgtagctcatggagtcctctcagtcacctctgtatgccctgcagcatccccagttctcagtgagaagagtgtgctctgaaagttaagtaacttacccaaggtcacacaaggtctgagtctcaaatgcatacaatttgaccccatagtctaaggtcttgaccgcaatggaataagaaatt

SEQ ID NO: 660 - DNA, 402 bp, Homo sapiens
tccagtccctgccaccgcttgccaggtgtgtcttgggcagcagttgcctttgctcggtggtcttcagctttgccccctgccaggcacgtgctggcctcctgcctgcatcgtagctcatggagtcctctcagtcacctctgtatgccctgcagcatccccagttctcagtgagaagagtgtgctctgaaagttaagtaactctacccaaggtcacacaaggtctgagtctcaaatgcatacaatttgaccccatagtctaaggtcttgaccgcaatggaataagaaattattttaccattctgagtggcagtctctgaagactacagcaataattgatgcctctcagggggataggtgtgtcacttacaggtgatagtgaggttgtcctcagcctccctgctc

SEQ ID NO: 661 - DNA, 402 bp, Homo sapiens
ccgaatctccgggcttcctgcatccctgggaggcaatgtccattaattccagctatgaccagcagagggcagcagcagcctggggaagacccagaggcccaggcctaggggagaggccggtgtctccaccctaggagccccaattcctccgcagcaggagcagacacacaaagaggagggcgagcaagggtcctccggggctggaacacctctgccgcacctgcagcagccttgctctatttcttcacaagcttccccatgacactgacccaaggctgtctggccactacagctgctgatgatgattagcaataataataataataaacgaaatgccttctgcttagatcatctttaatttcccctccagaatgacattcgactctgcttagagttacaggc

SEQ ID NO: 662 - DNA, 402 bp, Homo sapiens
tccgggcttcctgcatccctgggaggcaatgtccattaattccagctatgaccagcagagggcagcagcagcctggggaagacccagaggcccaggcctaggggagaggccggtgtctccaccctaggagccccaattcctccgcagcaggagcagacacacaaagaggagggcgagcaagggtcctccggggcggaacactctctgccgcacctgcagcagccttgctctatttcttcacaagcttccccatgacactgacccaaggctgtctggccactacagctgctgatgatgattagcaataataataataataaacgaaatgccttctgcttagatcatctttaatttcccctccagaatgacattcgactctgcttagagttacaggcagcccag

SEQ ID NO: 663 - DNA, 402 bp, Homo sapiens
cactttataaaataagatatcaaactctgaacagaacggacgtctcaaaaaatgggcatattacatttaaaccctcaatctgttgggtatttgagtgaaatggacatacctccagggagtcggtggcgagggccggctctgaggacttcctgggttgggatcctggctctgcaggactgcgtgaccttggtgagttacttctatccctccaaacgcgctgttctccttcatagaatggagatgaccacagggccagattcataaggttgttccttgtaatacaggtgaatatccatacccagcaactgctggaccacctgtggtttcaaggataatttccctcccacgtccccgtggcccttggaaccttcctctcctcctgtctccccctgcccccatcac

SEQ ID NO: 664 - DNA, 402 bp, Homo sapiens
ccttcctctcctcctgtctccccctgcccccatcactttgtaattgaaaagtcatgattgctctcccaggtgtagcactgctcacaggtcagattgcctgctctgacgtagtgactcagttggatgcggttcagctgtgtatgatcaactccctccccctgacaaaaacattattttgcatcacagagaagttgatttctcttcacacataaaagaaggcaaaaagtggtgcctaaagggctggtacagcagcttcaagaaatcaggaagaacctgggctccttctgccttcttgttctgccaatatcaccccatggctgccacttcatggcccaagtggaaccatggagcaccacccttcagacccataggtgacaacagcctgctctgtgagagtggcag

SEQ ID NO: 665 - DNA, 402 bp, Homo sapiens
ataggtgacaacagcctgctctgtgagagtggcagtggcttccagagagacttaggaagtagaatcaacaggacttggtgacagatttgccacagagctggggaacagggaggtccaacggtgactcccaaggagctgatgtgagaaccagagctgctgtgaatattgttcccaactcctgagacagggacagtggtcccagtggctaggaagtggtaggcagtagagagtcacaatgcacattagtatatcaacattgtgagtagggcacgcagggaagaaacctgttcaacccagccccgtgctagaaagacatcagcagggcctgcaaaagccctgattaaatctcacaagtttgcacctggagccgccatcttgaattgcaggtgaatatcagccttt

SEQ ID NO: 666 - DNA, 402 bp, Homo sapiens
gtgtgtgccaggcatgttcatgtatattcaggaagaagtgtcagtatttaagatcctcggcccttgcccgagtccccaacacgccttcttgtctggagaactgtaaatcttggaaacatcttgcaaggggggacacctcacagaaggcaggcttggcatgggataaacagaatcgactcctctgcttccttctgatgcacaggtgaatgggcaggtggaagcatcgttgcttaaagaggaaccaaaactccaccccagagctgctaattccttttggcttgcagttatgcagagggctaaaaaatccaacgaatcacaaatcccctggttgctaagtagaaagaatatgttttggctgctgctgttcccttccccaaggaaaagattcaagcagaggcggtc

SEQ ID NO: 667 - DNA, 402 bp, Homo sapiens
acctcacagaaggcaggcttggcatgggataaacagaatcgactcctctgcttccttctgatgcacagtgaatgggcaggtggaagcatcgttgcttaaagaggaaccaaaactccaccccagagctgctaattccttttggcttgcagttatgcagagggctaaaaaatccaacgaatcacaaatcccctggttgctaagttagaaagaatatgttttggctgctgctgttcccttccccaaggaaaagattcaagcagaggcggtccccacctctcaacacagaaagcaacatctctgattgcctctagacacaccttcatgctcgtggcactttgggaccctctgcccgctggcttatgggcatggcttccccatcactctgggtccttgggaagagcc

SEQ ID NO: 668 - DNA, 402 bp, Homo sapiens
aaagcaacatctctgattgcctctagacacaccttcatgctcgtggcactttgggaccctctgcccgctggcttatgggcatggcttccccatcactctgggtccttgggaagagcctctttcccagaccccacctctgtgcctcatcacatttctcccaggctattgacttgttcaaggttaaggtatgaagagagtcactgcagcagccctacctggctctgctctgctgggggaagccttttcagagcctgcctcttcctcagcatgaggggctgctcgggcccagtcccagaggccatgctggtcccaggggaaggtggccgtcatccccatctgtgttttctcttgcaggtaagtcatgctccagcagtcgggagggttgtgtgatgacacacttgg

SEQ ID NO: 669 - DNA, 402 bp, Homo sapiens
cttccccatcactctgggtccttgggaagagcctctttcccagaccccacctctgtgcctcatcacatttctcccaggctattgacttgttcaaggttaaggtatgaagagagtcatgcagcagccctacctggctctgctctgctgggggaagccttttcagagcctgcctcttcctcagcatgaggggctgctcgggcctcagtcccagaggccatgctggtcccaggggaaggtggccgtcatccccatctgtgttttctcttgcaggtaagtcatgctccagcagtcgggagggttgtgtgatgacacacttggcagtttgggagcaaaagccgccacagtaagacacaattgattcattgcctctcaaccctctgctggggtggactttcatgcgtg

SEQ ID NO: 670 - DNA, 402 bp, Homo sapiens
tctgctctgctgggggaagccttttcagagcctgcctcttcctcagcatgaggggctgctcgggcccagtcccagaggccatgctggtcccaggggaaggtggccgtcatccccatctgtgttttctcttgcaggtaagtcatgctccagcagtcgggagggttgtgtgatgacacacttggcagtttgggagcaaaagcctgccacagtaagacacaattgattcattgcctctcaaccctctgctggggtggactttcatgcgtggacttctgtccccaaagaggcttctctgggtctggaaagggccctagccttggttgggggaggcaaaggggtggcggcttccaggtaccatctggccaggaaccggctccattgtctgtgcatgtagcttgcact

SEQ ID NO: 671 - DNA, 402 bp, Homo sapiens
tctcttgcaggtaagtcatgctccagcagtcgggagggttgtgtgatgacacacttggcagtttgggagcaaaagccgccacagtaagacacaattgattcattgcctctcaaccctctgctggggtggactttcatgcgtggacttctgtccccaaagaggcttctctgggtctggaaagggccctagccttggttgggcggaggcaaaggggtggcggcttccaggtaccatctggccaggaaccggctccattgtctgtgcatgtagcttgcactgggctgcctgctccaagggaggcatctccccacgatctacgacattggcttcaaagagctgctcctggcagcttcgaatggctgagacctactggcatgggatggaggagtgcagggagcttcc

SEQ ID NO: 672 - DNA, 402 bp, Homo sapiens
acctttctcccacccatcacctcacatcaaggtttcagccagcgggaaccaggtttagactccaattacctgtgcgtgtgggaggttggattgtgacatctttggagggccgggcttctgaagcgacatttgatttctggtactgaaatgtcaaagggtcctgaggcacccgctagggcagcacgcggagcatccacctgctgtgcgcatcctgggctctctctgggccacttggtgctggggacatgccgggagctggtggtcagccctcctcctgcctcctcagtgctgcatcttcaccttctgcagctgcctaccagaagcagggggacctggaaggcaaaggagagggagttggcatgtagtgagcaccgactgtgcacacagtgccagcaaggagct

SEQ ID NO: 673 - DNA, 402 bp, Homo sapiens
gtcacagctgcccagtggctgtggaagccgatggactgggccctctcccagtacacaatcattagagggtctcagttcactgagtaactgtgggagcagcacggtgcctccatcagcccccagttctgctttcgaaacatcgtcaccatcgccaaagcaaagcctcagacctgcaggccagcgctcccatgccccatagcctgggagtaaaggacagatgcggggaatctggaaggagattcacttcaagcaccatcccactctatttgttaaacttgtgctcctgtgaaaactgcttgtgtctgcatcaaacccagctagggagggctgagggctaagggtaaacctgggagagttgaattccagtgctgtgattaaaaccaatattccacataatgcaat

SEQ ID NO: 674 - DNA, 402 bp, Homo sapiens
caggaagtgagactcgccttccccagattaagaataaagaagacaaactatccacggctgctgtgagcctctcatcagacctcagcttctagggcagggtccctgcctgtctccagtatgtggcctctgtgtcttcttcgccctccatccccacagtgggacgagaagtcatcaggaaggcaggggatctgcaggcagccagtcagggctctaattgcagctggctgggggaccatgggtcagggctgccaccccctggctctgtgccttcacctgtgtaacgaatggggcactcacagcccctctcaagtggtcctggggatgaagtgagaaggtgacatatacaagtgagttatacacgttcctgttctgtcactcaccagtgctcactgggtgggtcac

SEQ ID NO: 675 - DNA, 402 bp, Homo sapiens
gacgagaagtcatcaggaaggcaggggatctgcaggcagccatcagggctctaattgcagctggctgggggaccatgggtcagggctgccaccccctggctctgtgccttcacctgtgtaacgaatggggcactcacagcccctctcaagtggtcctggggatgaagtgagaaggtgacatatacaagtgagttatacacgtttcctgttctgtcactcaccagtgctcactgggtgggtcactgaactcccctcagcgtttccttctccatctgtaaaccaccagtgcaaacctttcccagatagtgctgacccgaagcaggaaccagtgcccctctgccctcagtaagtctgccagcagaggaagcccatagagggtcttgggaaatgaagccaacagag

SEQ ID NO: 676 - DNA, 402 bp, Homo sapiens
gatgaagtgagaaggtgacatatacaagtgagttatacacgttcctgttctgtcactcaccagtgctcactgggtgggtcactgaactcccctcagcgtttccttctccatctgtaaaccaccagtgcaaacctttcccagatagtgctgacccgaagcaggaaccagtgcccctctgccctcagtaagtctgccagcagagggaagcccatagagggtcttgggaaatgaagccaacagagtcaagagggtcagatgatgagggacttcaagtgccaccttcatcccattctttctgcaaatattcaccacacacctacgtgacctcaggctctgtgtcaggtcctggggatgtaatggtgtccatgaagaaacaaggtccctgccctcatagagtggcct

SEQ ID NO: 677 - DNA, 402 bp, Homo sapiens
cttcaagtgccaccttcatcccattctttctgcaaatattcaccacacacctacgtgacctcaggctctgtgtcaggtcctggggatgtaatggtgtccatgaagaaacaaggtccctgccctcatagagtggcctgacatatgcccgaggcagtcagcagccgagtgcgggagactcttgagcagagattgagtgtgttagatatctgtaggcatcagcctggctttgctgagtgagctatatcagagtggaggaggccagaggcaaagtccagactccactggatcctggattgaggggagaaggggctgggcggaggagcagcctgagcacctgcatctcactccaactgggtgctgatttgtccccatggccccagcacccaggcaggtcaccaagta

SEQ ID NO: 678 - DNA, 402 bp, Homo sapiens
tccctgccctcatagagtggcctgacatatgcccgaggcagtcagcagccgagtgcgggagactcttgagcagagattgagtgtgttgatatctgtaggcatcagcctggctttgctgagtgagctatatcagagtggaggaggccagaggcaaagtccagactccactggatcctggattgaggggagaaggggctgggctggaggagcagcctgagcacctgcatctcactccaactgggtgctgatttgtccccatggccccagcacccaggcaggtcaccaagtaagctcaagacaaaaatgatgagtgactcaacagtgtctggggacaagggagggagagaagaactcaaaatgactgaggtttccagctaccagaaaaatggaaggaccttgaaa

SEQ ID NO: 679 - DNA, 402 bp, Homo sapiens
aggcatttcagcaaaagcctctttgctacagtgattatggtgaagcagatgcccacagctgagatgggcaactctcaggcctccagtggggacagagaatccctgggccccaacatagcttggcctgaagatctgagtcaggcatccaacctcttctgctcagctctttcaggaagatgtgtatactggcctctcttgccgtcaagggtccaccaccttccttatgtgtgacctaaggcttctagtgctggctcagtggctaatttgagcataagcacccttgttggtaaaatgaaggataggtgtagatcagcatttcccaaagtgtgtgcttctcagaaaattaggtccctggttgtctgtagaggttacttaacaaagagactctgtagttatgttaga

SEQ ID NO: 680 - DNA, 402 bp, Homo sapiens
ctgaagatctgagtcaggcatccaacctcttctgctcagctctttcaggaagatgtgtatactggcctctcttgccgcaagggtccaccaccttccttatgtgtgacctaaggcttctagtgctggctcagtggctaatttgagcataagcacccttgttggtaaaatgaaggataggtgtagatcagcatttcccaaagctgtgtgcttctcagaaaattaggtccctggttgtctgtagaggttacttaacaaagagactctgtagttatgttagaaataaatcttatgattaccaggattagtctctttaaagcttgtctaggtgggtcacaaatccgcctcagtcaggctttaaatggggaacagggtttaaattggatttaaacatttaaaaaccat

SEQ ID NO: 681 - DNA, 402 bp, Homo sapiens
gaaggataggtgtagatcagcatttcccaaagtgtgtgcttctcagaaaattaggtccctggttgtctgtagaggttacttaacaaagagactctgtagttatgttagaaataaatcttatgattaccaggattagtctctttaaagcttgtctaggtgggtcacaaatccgcctcagtcaggctttaaatggggaacaggtgtttaaattggatttaaacatttaaaaaccatgctaacaagaaccaaaagaaagtgagagtagctacattgatttcagacagagcagacttaaggaacattgttagggataaggatggatattacataataacaaaggtgtcaatactccaagaaaacataacaatccttaatgtgtgtgcacctaacaaccgagggtca

SEQ ID NO: 682 - DNA, 402 bp, Homo sapiens
aatcttatgattaccaggattagtctctttaaagcttgtctaggtgggtcacaaatccgcctcagtcaggctttaaatggggaacagggtttaaattggatttaaacatttaaaaaccatgctaacaagaaccaaaagaaagtgagagtagctacattgatttcagacagagcagacttaaggaacattgttagggataaaggatggatattacataataacaaaggtgtcaatactccaagaaaacataacaatccttaatgtgtgtgcacctaacaaccgagggtcaacatacagaagacaaaaaatgatataaatgcaaggaggaatacatcagtcaactgttacacttggaggccttaacacccctctaccagaaatggacagatccagcaggcagaa

SEQ ID NO: 683 - DNA, 402 bp, Homo sapiens
agaagacaaaaaatgatataaatgcaaggaggaatacatcagtcaactgttacacttggaggccttaacacccctctaccagaaatggacagatccagcaggcagaaagtcagtcaaggcatagctgaactcaatgacactatcaattaactggatgtaattgacatctgtaggctactcatccaacaagagcagatatcgttatttttctcaaacccacatgggacgttcaccaagataggccacattctgagtcattaaacatacttaacaaaagcaaaataataaaaatcatacaatgtctgctctcaaagcacaatggaatcaaactaaaaatcaataacaaggagatagcaagaaaatcccaaaatacttggagattaaacaacactcctaaataac

SEQ ID NO: 684 - DNA, 402 bp, Homo sapiens
ctacaatctcttctagaagataggaacaaaggaaatatttcctaactcattctatgaggccaatattaccctaataccaaaaccagacaaagacatcagaaaagaaaactacagactaatatctctcatgaacatagatgcaaaaattctcaacaaagtatttgcaaattgagtccaacaacgtataaaaagaattataaagccatgaccaagtgagatttatcccagttatgcaaggctggtccaacatttgaaaatcagttaatgtaacccatcacatcaacaggctaaagaagaaaaatcatataatcatataaacagatgtggaaaaagcatttgacaaaatctaacccccagttgtgattaaaactctcaaaaaacaaggaatagaggggaattttc

SEQ ID NO: 685 - DNA, 402 bp, Homo sapiens
acaggctaaagaagaaaaatcatataatcatataaacagatgtggaaaaagcatttgacaaaatctaacccccagttgtgattaaaactctcaaaaaacaaggaatagaggggaattttctcaccttgataaagaacatctacaaaaatcctccagctaacatcatacttaatggtgagaaactagaagctttcctactaagggtacaaggcaaggatgtcccctctcactcctccttttcaacatcatattggaagtcctaggtaatgcaatgagacaacaaaaggaaataaaaggtatacacatagggaagggaaaaataaagctgtttttgtttccagatgacatgattatctgtatagaaaattgaaaagaatcaacaacaaaaacaaaaacctcatg

SEQ ID NO: 686 - DNA, 402 bp, Homo sapiens
aaagaatcaacaacaaaaacaaaaacctcatgtaactaataagctattatactgaggttgcaggataaggttaatatacaaaagtcgatcactttcctatataccagcaatgaacaagtagaatatgaaatttaaaacacactaccatttacattggtaaggtatatcccaaaatgaaatacttataatctaaataagtactaaatcaaataacatatgtacaagatctatatgaagaaaactacaaaactctgatgaaagaaatcgaagaagagccaaataaatgaagagtattccatgtttgtggataggaaaccttggtattgtcaggttatcagttctttccaacttcatctatagattaaatgcaatcccagccaaaattattggttattagcaact

SEQ ID NO: 687 - DNA, 402 bp, Homo sapiens
atcaacaacaaaaacaaaaacctcatgtaactaataagctattatactgaggttgcaggataaggttaatatacaaaagtcgatcactttcctatataccagcaatgaacaagtagaatatgaaatttaaaacacactaccatttacattggtaaggtatatcccaaaatgaaatacttataatctaaataagtataaatacaaataacatatgtacaagatctatatgaagaaaactacaaaactctgatgaaagaaatcgaagaagagccaaataaatgaagagtattccatgtttgtggataggaaaccttggtattgtcaggttatcagttctttccaacttcatctatagattaaatgcaatcccagccaaaattattggttattagcaactattaa

SEQ ID NO: 688 - DNA, 402 bp, Homo sapiens
atagatctaaatataagacacaaaactataaaactcctagaatataacatggaatcatatctagaagatcctgagtatggcagtgactttctagatataacaccaaaggcacaatctgtgaaagaaataattgagaagttggaattcattaaaatttaaacctctgccctgtaaaaggcaatgttaagagaatgagaaaactaagccacagactgggaaaaaatatttgaaaaaatatatatctgataaaggactgttattcaaagcatacaaagaactcttaaaaatcaataattagaaaattaaaaatctgattcaaaaataagcagaagacccgaacagacatttcaccaaggaagatatacagatggcaagtaagcatgtgaaaaaatgctccacata

SEQ ID NO: 689 - DNA, 402 bp, Homo sapiens
agaagttggaattcattaaaatttaaacctctgccctgtaaaaggcaatgttaagagaatgagaaaataagccacagactgggaaaaaatatttgaaaaaatatatatctgataaaggactgttattcaaagcatacaaagaactcttaaaaatcaataattagaaaattaaaaatctgattcaaaaataagcagaagacctcgaacagacatttcaccaaggaagatatacagatggcaagtaagcatgtgaaaaaatgctccacatatgtcattagggaattgctaattaaaacaatgatgagatgccactacagaactcatagaatggccaatatccaaaacacttaacaacacaaaatgtaggtgagaatgtggagaaacaggaactctcatcagtgc

SEQ ID NO: 690 - DNA, 402 bp, Homo sapiens
cagctgctttggaagacagtttggcagtttcttacaaaactaaacagacccttaccataagattcatcagtcatgccctttggtattcacccaagtgaaccaaaaacttgtgttcacacaaaaaactgcatgtggatgtttacagcagctttattcataattgacaaaacttgtaggccaccaagatgtccttcagtgagctgaatggttaaataaatgatggtgcatcctggcagtagaatattactcaagactaaaaagaaatgagctatcaagccagtagaaggcatggaggaaccgtaagtgcacattactaagtgaaaaaagccaatcatgcttccaaccatgtaacattatggaaaaaagcaaaactatggggacagtaaaaagatggctggtttc

SEQ ID NO: 691 - DNA, 402 bp, Homo sapiens
accaaaaacttgtgttcacacaaaaaactgcatgtggatgtttacagcagctttattcataattgacaaaacttgtaggccaccaagatgtccttcagtgagcgaatggttaaataaatgatggtgcatcctggcagtagaatattactcaagactaaaaagaaatgagctatcaagccagtagaaggcatggaggaaccagtaagtgcacattactaagtgaaaaaagccaatcatgcttccaaccatgtaacattatggaaaaaagcaaaactatggggacagtaaaaagatggctggtttccagggttgtggggaggaagggatgattaggtggagcacaaaggatttttagggcattgaaacagttctgtatgctactacaatggtagacatatgtcg

SEQ ID NO: 692 - DNA, 402 bp, Homo sapiens
ccaatcatgcttccaaccatgtaacattatggaaaaaagcaaaactatggggacagtaaaaagatggctggtttccagggttgtggggaggaagggatgattaggtggagcacaaaggatttttagggcattgaaacagttctgtatgctactacaatggtagacatatgtcgtaattcatttgtcaaaacacagagaatagtaccaggagtgaaccctaatgtaaactatggactctgggtgatagtgatgtgtcattgtagattcctcagttattacaaatgcatcatcctggtgtgggatgttgatggtgggggaagctgtgcatgtgcgggagtagggagtatatgggaactcttctacttcccacttaattttgcagtgagcctaaaactactctaa

SEQ ID NO: 693 - DNA, 402 bp, Homo sapiens
ggagtgaaccctaatgtaaactatggactctgggtgatagtgatgtgtcattgtagattcctcagttattacaaatgcatcatcctggtgtgggatgttgatggtgggggaagctgtgcatgtgcgggagtagggagtatatgggaactcttctacttcccacttaattttgcagtgagcctaaaactactctaaaaaatagaagtttattaatcaacaaagaacacagtgagctgcaacttcataaccagtagattgacaagaattaagaaatttaataaagaattgattagaatatggagcaacaggaactcttacacattactgatggaaaagaaaattggtatacctactttgtaaatagtttggaaatgcctagaaaagttgaatatgaccccaaaa

SEQ ID NO: 694 - DNA, 402 bp, Homo sapiens
gcagtatcatttcaacagcaaaaactggaatcaatttaaacagctctcagtggttgaatgaataaactcattttatgcaaaatgaaaataaaaatagatatgggaacaagatttactatcaagtggttttctcaactttcctctcttcttaagaatattttattttgcctgccatcaaaacttttgttccagggcatccactggtccattgtttagtttctgcactgaacaaaggctcttgatgaaggagtgagtgggagctgaaatccagccatgctctgctccccaagccatgcatttgggtgcaggctctgtctctacccagagagaggaggcatcttttacttcagatattgatgtcatctattccccaaatccagtgcttacaagtctggatctgcc

SEQ ID NO: 695 - DNA, 402 bp, Homo sapiens
tgggaagtatttttcaaattcatctactcagcctgagcatcattttctaactcacacaaaggcattttttagattagtaggagcactgacctgttcaccacccagcctatccatcctggtacaatcctgttgtaaccaagcaggtacccaggcctttttaatgcagcagagaaataggaagtgaggcaggagggaggcaacggtgatgtcttgtcttttctttgtcatgaaaaggtcaggaaagggacagatagagtgaaagaagattggaaaataagccagagaggctcggttgttcttcataacaaaaagaagttgggggtaagtaagagaaagagccaggaaagagagccagaaaagtcccaaaggaggggtgccctggggagccctcttgtgctttat

SEQ ID NO: 696 - DNA, 402 bp, Homo sapiens
cacattctaattaggagcttctgaacccaaaggaatttcagataaggggaaatttaggcccaaagccaggagaaggggtgagtagggcttgatctctgcctctgaagggcagagggcgtggactattcttggctcttaggggacagctagagaaatgtgggtctcatggcgacaactctggactccattggaagaaccttcttaacagtcagggctcccagagataaactagacaagtcaccaagagaggcagtgggtacccctcacaggaggggtgcaaatcaaagccaaggcttggagtggaccatattaaatccatttcttatcctgtgattcttagagtcctatctgtatcaggggaaggcaggtgggttctagaactttctaaatgtgtccctgtgg

SEQ ID NO: 697 - DNA, 402 bp, Homo sapiens
cgtggactattcttggctcttaggggacagctagagaaatgtgggtctcatggcgacaactctggactccattggaagaaccttctaacagtcagggctcccagagataaactagacaagtcaccaagagaggcagtgggtacccctcacaggaggggtgcaaatcaaagccaaggcttggagtggaccatattaaatccattttcttatcctgtgattcttagagtcctatctgtatcaggggaaggcaggtgggttctagaactttctaaatgtgtccctgtgggtttttccttctccagctacacacaaacttgggcctaataagaagtctatggcattaacccagcaggaatgcttaatgcttatatctgacctcaaaccaagactgtctccacagtg

SEQ ID NO: 698 - DNA, 402 bp, Homo sapiens
cccaggaggcagaggttgcagtgagcccagattgaaccactgcactccagcctgggcaacagattgagaccctattaaaaaaaaaaaaaaaaaaggaaggaaggaaggaaggagaaaagaaaaaagaaaagaaaagaaaagaaaagaaaaatgacctgaagtcactggatttccttcgaggtagccagaaacagaggaaaagggggcattgcccacttagggtaaaaagtagagcaccgaattgtggaaggctgcaggttttcatgtgtgcttgcccaagtgatgttccatgtcaggctctagggtccctgcagggacagagagggactaacatttacttacatgcctatagtatgtcaggcatatacttgtgcctttatatatatcagctctgtttttgtc

SEQ ID NO: 699 - DNA, 402 bp, Homo sapiens
cactgctgtcccattttacagatggggaaacccaagctctgagtggttcagcaaaccctgggtgcatacccccaccttgcccctgcaaaaccaacaaaaaaacgaaggccctgccttcctggagctgacatttaggttgattctgaaagtcagtaggcccagattttcactcttcatttttcttgtttggaatgagagagctacacagctgggtcgggggaaggagcgagggtctaggcctgcatccactcaccccaaaggaaaggagtaggggaccagtctgctggacatgcagacagcgattggagaaaagtcagcccagctatgaaccccattcctttcagtatgagccaagagggatggcatctgtcagagttgctggatttgggattttgcatcttg

SEQ ID NO: 700 - DNA, 402 bp, Homo sapiens
atggggaaacccaagctctgagtggttcagcaaaccctgggtgcatacccccaccttgcccctgcaaaaccaacaaaaaaacgaaggccctgccttcctggagctgacatttaggttgattctgaaagtcagtaggcccagattttcactcttcatttttcttgtttggaatgagagagcacacagctgggtcgggggaaaggagcgagggtctaggcctgcatccactcaccccaaaggaaaggagtaggggaccagtctgctggacatgcagacagcgattggagaaaagtcagcccagctatgaaccccattcctttcagtatgagccaagagggatggcatctgtcagagttgctggatttgggattttgcatcttgccaagtgtccatgaggaattg

SEQ ID NO: 701 - DNA, 402 bp, Homo sapiens
aaaacgaaggccctgccttcctggagctgacatttaggttgattctgaaagtcagtaggcccagattttcactcttcatttttcttgtttggaatgagagagcacacagctgggtcgggggaaggagcgagggtctaggcctgcatccactcaccccaaaggaaaggagtaggggaccagtctgctggacatgcagacagctgattggagaaaagtcagcccagctatgaaccccattcctttcagtatgagccaagagggatggcatctgtcagagttgctggatttgggattttgcatcttgccaagtgtccatgaggaattggggaaactctccccctggctggactgaggcttcagcaagcattgttgctgcccagtggtgatcagctcagtgtcctt

SEQ ID NO: 702 - DNA, 402 bp, Homo sapiens
aaagtcagtaggcccagattttcactcttcatttttcttgtttggaatgagagagcacacagctgggtcgggggaaggagcgagggtctaggcctgcatccactcaccccaaaggaaaggagtaggggaccagtctgctggacatgcagacagcgattggagaaaagtcagcccagctatgaaccccattcctttcagtactgagccaagagggatggcatctgtcagagttgctggatttgggattttgcatcttgccaagtgtccatgaggaattggggaaactctccccctggctggactgaggcttcagcaagcattgttgctgcccagtggtgatcagctcagtgtccttggaaaagagcagaaagtggtatcacgaacatatcttctcctttgctt

SEQ ID NO: 703 - DNA, 402 bp, Homo sapiens
tgaaacttggttttgggcaaaatttgtgatgttctctctgcccaatccagcctcaggctacaaatgaatgtaaaaatctctaatttagtgccaagtaacagaaaacagctctacttatcttaagccaaaaagagggacttctcagaggcatactaatggaggatggcaagagggcctcacgtggaaccagggcctggagcaggcacagcattcaggaagctcagtctccttctctctctctctctcatctctgcttgtttccctttacctgtagacatgctatcatttttccaatatccatggcagaatgtggccaccagtaactccaggtgtataacagaagcctggcctcccaggagagggtgacttgatgcccttagctccagccttccactcccaccc

SEQ ID NO: 704 - DNA, 402 bp, Homo sapiens
ggctacaaatgaatgtaaaaatctctaatttagtgccaagtaacagaaaacagctctacttatcttaagccaaaaagagggacttctcagaggcatactaatggaggatggcaagagggcctcacgtggaaccagggcctggagcggcacagcattcaggaagctcagtctccttctctctctctctctcatctctgcttagtttccctttacctgtagacatgctatcatttttccaatatccatggcagaatgtggccaccagtaactccaggtgtataacagaagcctggcctcccaggagagggtgacttgatgcccttagctccagccttccactcccaccctgggccaagcaactggtggccaggaggagctcatattgcaggaatattgaaattt

SEQ ID NO: 705 - DNA, 402 bp, Homo sapiens
acaaatgaatgtaaaaatctctaatttagtgccaagtaacagaaaacagctctacttatcttaagccaaaaagagggacttctcagaggcatactaatggaggatggcaagagggcctcacgtggaaccagggcctggagcggcacagcattcaggaagctcagtctccttctctctctctctctcatctctgcttgtttctcctttacctgtagacatgctatcatttttccaatatccatggcagaatgtggccaccagtaactccaggtgtataacagaagcctggcctcccaggagagggtgacttgatgcccttagctccagccttccactcccaccctgggccaagcaactggtggccaggaggagctcatattgcaggaatattgaaattttcac

SEQ ID NO: 706 - DNA, 402 bp, Homo sapiens
tgcaccagtgcccaagtctgtcactccctcctctcattctgaaacatcctctgcactccattcaccagtgccaagccttgcccttcttcagggttcaactttgtcccaccttctctgagaaggctgccctggtccctgcaaccgctatgagctgccttttctgagctcttctgctgtggaggatccatgccattgacctaaggcacccgttttccacatattgagcattgctgagcacctattctgtgccaggcactgtgcttcagggccatgggggatgctccaagcggtaaaatgcaaccaaagccccgaaggagctcacattctagtcatgtccacaaagaggtaataaatccataaattgtatgtactattctagtcacaataaaattgtgtcgtact

SEQ ID NO: 707 - DNA, 402 bp, Homo sapiens
gtgcccaagtctgtcactccctcctctcattctgaaacatcctctgcactccattcaccagtgccaagccttgcccttcttcagggttcaactttgtcccaccttctctgagaaggctgccctggtccctgcaaccgctatgagctgccttttctgagctcttctgctgtggaggatccatgccattgacctaggcacccagttttccacatattgagcattgctgagcacctattctgtgccaggcactgtgcttcagggccatgggggatgctccaagcggtaaaatgcaaccaaagccccgaaggagctcacattctagtcatgtccacaaagaggtaataaatccataaattgtatgtactattctagtcacaataaaattgtgtcgtactgtaatgc

SEQ ID NO: 708 - DNA, 402 bp, Homo sapiens
aatgcatatatataatcatttactcatgaatattaatgtatttaatgagggtaaaagatattacttaaagcaaagtattcgttccagctactgttggatttgttcattactgtttcccatgcagatattacctgtgatttacctgcatatcaagcatctggaagtagctcaaatccacctgtgggtaaattaggttagccagtttgttggcaaaaattacagtgttaactaatttccagggtatgcttgcagtcagtagtttcatacttaggtacatgacttgcattcacatcatctggttaatggtgtgaacagagattttctttatggtttttggaatacagtaagataatgttaagctaacgtaagtctgttaacagtacctggttctgaactgtattt

SEQ ID NO: 709 - DNA, 402 bp, Homo sapiens
ggtacatgacttgcattcacatcatctggttaatggtgtgaacagagattttctttatggtttttggaatacagtaagataatgttaagctaacgtaagtctgttaacagtacctggttctgaactgtatttataaggtgtatcataaaaccattactttggagtttgccaatcttaaattcagaacaattcaaaaatgagtccagaatctagtttgcatcattaccacttataaaaataaggatctgtaagttggctggataaaatatattacaaaataatgacttaagtggctctggagccagcacaaaagataaaaattgggtatactcaaaattaccttcaaaatatcttaagtcattcttaaaatacatgtaaatatgccaactcaaaatacatcca

SEQ ID NO: 710 - DNA, 402 bp, Homo sapiens
aggtcctagatgtgttgctaggcatttggagtttactgagatctgcaaagctgacttcttccccagtttcaggtggttcaggctgttcttgcctctccttggtgtgtcagagtagaggagaaatgactttcagtgctgggaccataaccctgtttccactccacttctgacttgcactgtgggctgagaattgacattctagcttggggaaattttgttcccccaaccgtagcaaagtttaattaccatgttcccgctgtggggggaaatcctattcaagaaaccagcctctctcaaatcaatcagtcatcttgctcattgaccaatggttcggccacccggcaagaaattagaaaaatctatgcataggagaaagctttccaacagccctggaaaggcctt

SEQ ID NO: 711 - DNA, 402 bp, Homo sapiens
tccccagtttcaggtggttcaggctgttcttgcctctccttggtgtgtcagagtagaggagaaatgactttcagtgctgggaccataaccctgtttccactccacttctgacttgcactgtgggctgagaattgacattctgcttggggaaattttgttcccccaaccgtagcaaagtttaattaccatgttcccgctgtcggggggaaatcctattcaagaaaccagcctctctcaaatcaatcagtcatcttgctcattgaccaatggttcggccacccggcaagaaattagaaaaatctatgcataggagaaagctttccaacagccctggaaaggccttgggccccaaagggctagtatgaggttgaggtgggggagagcaagagaggacaaaacagg

SEQ ID NO: 712 - DNA, 402 bp, Homo sapiens
ccgctgtggggggaaatcctattcaagaaaccagcctctctcaaatcaatcagtcatcttgctcattgaccaatggttcggccacccggcaagaaattagaaaaatctatgcataggagaaagctttccaacagccctggaaaggccttgggccccaaagggctagtatgaggttgaggtgggggagagcaagagaggacagaaacaggctgggtactgaccttcctcgtactccatggctcagaactctgacctcttgccaacctgccttccgcaagcagcgagagtagcacggctctgaggggcatggccagggaggatgtgacctctaagtgctccaagtcactgggaaccctgttctaataataggcaaagcttcagttgatggagtgcctatatggg

SEQ ID NO: 713 - DNA, 402 bp, Homo sapiens
aagaaaccagcctctctcaaatcaatcagtcatcttgctcattgaccaatggttcggccacccggcaagaaattagaaaaatctatgcataggagaaagctttccaacagccctggaaaggccttgggccccaaagggctagtatgaggttgaggtgggggagagcaagagaggacaaaacaggctgggtactgaccttccttcgtactccatggctcagaactctgacctcttgccaacctgccttccgcaagcagcgagagtagcacggctctgaggggcatggccagggaggatgtgacctctaagtgctccaagtcactgggaaccctgttctaataataggcaaagcttcagttgatggagtgcctatatgggcccagccctgtgaacagcttcctc

SEQ ID NO: 714 - DNA, 402 bp, Homo sapiens
gccgctgccagtccccaactcaacaggagagagctggacaataaagaccctgtgagcacccacaacttcccattggctgcatcctgttagaatctagaggtcatgggagcctgggagaggccacccatgaagatcagcttccaggggcagagagcagagtggacatggaggggcaaatggggaccgtccagcacagtcacctatctcatagacattttcctccacctcctacctcgagtagccagtagggttccagccggactgtggagcatcatcccaacaactgcatggctgcttcccactgtccctttaacagcgcacatgggagggagccacaggtcagcaaggcccttggctcccgctgtggccctcacccatgcccatccccacccgtccccatgc

SEQ ID NO: 715 - DNA, 402 bp, Homo sapiens
cacccacaacttcccattggctgcatcctgttagaatctagaggtcatgggagcctgggagaggccacccatgaagatcagcttccaggggcagagagcagagtggacatggaggggcaaatggggaccgtccagcacagtcaccatctcatagacattttcctccacctcctacctcgagtagccagtagggttccagcacggactgtggagcatcatcccaacaactgcatggctgcttcccactgtccctttaacagcgcacatgggagggagccacaggtcagcaaggcccttggctcccgctgtggccctcacccatgcccatccccacccgtccccatgctcagcacatcagcttcactctggctgaccatgtgcacagacatgactcagtaagtc

SEQ ID NO: 716 - DNA, 402 bp, Homo sapiens
cacccatgaagatcagcttccaggggcagagagcagagtggacatggaggggcaaatggggaccgtccagcacagtcaccatctcatagacattttcctccacctcctacctcgagtagccagtagggttccagccggactgtggagcatcatcccaacaactgcatggctgcttcccactgtccctttaacagcgcacaatgggagggagccacaggtcagcaaggcccttggctcccgctgtggccctcacccatgcccatccccacccgtccccatgctcagcacatcagcttcactctggctgaccatgtgcacagacatgactcagtaagtctgtcttttcttttcttttttctttctttctttttttttttttttttgagactgagcctcactctg

SEQ ID NO: 717 - DNA, 402 bp, Homo sapiens
gagtggacatggaggggcaaatggggaccgtccagcacagtcaccatctcatagacattttcctccacctcctacctcgagtagccagtagggttccagccggactgtggagcatcatcccaacaactgcatggctgcttcccactgtccctttaacagcgcacatgggagggagccacaggtcagcaaggcccttggctcgccgctgtggccctcacccatgcccatccccacccgtccccatgctcagcacatcagcttcactctggctgaccatgtgcacagacatgactcagtaagtctgtcttttcttttcttttttctttctttctttttttttttttttttgagactgagcctcactctgttgcccaggctggagtgcagtggcatgatctcagc

SEQ ID NO: 718 - DNA, 402 bp, Homo sapiens
gtcttgaactcctgacctcaggtgatctgagcacctcgatctcccaaagtcctgggattacaggtgtgagtcaccatgcccagccaactcagtaagtcttttgaatgtgagcggaggcccccactcagcatttccaagacctgggaaatgagggtgaggagggggccaagagctctgatttcaagtcccagccctgccaccgcattccttagggcaggcacccaccaccgccttggctcaggcctcagtttccatctggaaggtgctggctgccttgatgggcctctatgggccctccagctctgtggctccatgtcaaatgcccctgaccacccttgagattaaccctttcccaaggatagacagcttcccccatcattctagatccctcacacttcccca

SEQ ID NO: 719 - DNA, 402 bp, Homo sapiens
ggcctcagtttccatctggaaggtgctggctgccttgatgggcctctatgggccctccagctctgtggctccatgtcaaatgcccctgaccacccttgagattaaccctttcccaaggatagacagcttcccccatcattctagatccctcacacttccccagctcctacggaaataacctatcccatcccctaagatctcgcaactgttgagggtaagtttttggttaaaaagagtgagacagactttggcgctagtgcaaaacaagctgctgctgtaagagtgcatgtgtgtacctgcagactggtgcaatcagatgaccttcccaccaggctgcacagcactggatgtcctcacagtcactcagccactcagcaaactttgactgcacagcaacccatg

SEQ ID NO: 720 - DNA, 402 bp, Homo sapiens
gctgctggactccaggcatgttgagaaatgaatataatacccaggctatggcctcaaaaccttcaaaacccagggcaggacacagacagggacacagatgtgatacctgctgggatacagtcctcatgaggctctctaagaggtatctaagcagggacctagagggaggaggtattacctgagttgaacctaatggaaagagcattgcaggcagagggatcagtataagcaaatactcagaccaaaaacaatggcatgggggactccaccaaagaagtaaaagagaatagggtgctacatggtgtctcagtcccttttctgttgcttagaacactgaaactaggcaatttataaagaaaaggaatttatttcttatggttatggaggcttggaagtcccagg

SEQ ID NO: 721 - DNA, 402 bp, Homo sapiens
ccaccaaagaagtaaaagagaatagggtgctacatggtgtctcagtcccttttctgttgcttagaacactgaaactaggcaatttataaagaaaaggaatttatttcttatggttatggaggcttggaagtcccaggttgagggagcacatctggtgagcccttcttgctgggggcaggtactccctgcatagtcccaaaagcagcataaggcatcatatggtgagggggctgagtgcactagctcaggtttctcctaaaaacccaccagtcccactccccaaataatccattaattcattcacccacaaatttattaacctcttaaaggtcctacctcgcaatactgccacattggagattgagtttcaacatgagtttttgaggggaaaagtattcaaac

SEQ ID NO: 722 - DNA, 402 bp, Homo sapiens
gcatccaggccacagcaaaagcatgagacatacttggtgagtgagcaagagaatggaagaagaaatcaatggagccaaatgactccaccagatttgcatttgagacggtcactgcaagactgcaccagtcccaaattcccaagacagcaatgttttccacgatgggtctgaacatgtaaccattctcaggttcctgttggagggtttgggagcctagaaactgagacagcctcacagctgacagatcacgagcagccatctaagtcgacgtttccaaagtcatggggcctatggtttgtgagcttatttaggttgtccccgggcccagcatcaaaagcattgagacacgtactgagggactcttttcctagcctctcagtcctgactgctcaaggaccaagt

SEQ ID NO: 723 - DNA, 402 bp, Homo sapiens
tgtggttaaaattaccttccattcgtggtgggtgtatgtcaggatccccacaagaaacagagggacacccaaattagggacatacttcagagggactaatgacaaaggcatgggtgggagtagaggggaatacaagggagacttcaagaatcttggcctttattataaatgcaatgtatgtccactatggaaaatttgggagaaaaaagcaaactagaaagaagaaaaaccacattgcctgaattcctactgcatggagagaagcatcataaacaccttttggaggagtctcttcttcctttctccctttctccttctttgtatagagaggtctttcctgaggacttcccagaatcttgcagatccaaaatcttaagaatttgcagaggcagtgaggagtta

SEQ ID NO: 724 - DNA, 402 bp, Homo sapiens
agtagaggggaatacaagggagacttcaagaatcttggcctttattataaatgcaatgtatgtccactatggaaaatttggggaaaaaagcaaactagaaagaagaaaaaccacattgcctgaattcctactgcatggagagaagcatcataaacaccttttggaggagtctcttcttcctttctccctttctccttcttgtgtatagagaggtctttcctgaggacttcccagaatcttgcagatccaaaatcttaagaatttgcagaggcagtgaggagttaacatgcacagctcagggaatattctgctttttatctggaaccaggctcggaacaagactccttgcttttctgtcctgtgttttcatcttctctcagaaccctaactttgagataagat

SEQ ID NO: 725 - DNA, 402 bp, Homo sapiens
ctgaggacttcccagaatcttgcagatccaaaatcttaagaatttgcagaggcagtgaggagttaacatgcacagctcagggaatattctgctttttatctggaaccaggctcggaacaagactccttgcttttctgtcctgtgttttcatcttctctcagaaccctaactttgagataagatctttgactattattaggctgggtgcaaaagtaattgtagtttttggcattatttttaatagaactgcttctgtgtcctcagatctccatcgttcatctcctgataagtccctgaaaatttcctggccccttggagctccttccaggagtagaatgatcacaagagctgccatgtattgcttattctggcctatttccttaggcacattagcccatctaa

SEQ ID NO: 726 - DNA, 402 bp, Homo sapiens
ggtgcaaaagtaattgtagtttttggcattatttttaatagaactgcttctgtgtcctcagatctccatcgttcatctcctgataagtccctgaaaatttcctggccccttggagctccttccaggagtagaatgatcacaagagctgccatgtattgcttattctggcctatttccttaggcacattagcccatctaacctgtttccatggcccacagaggtgggaggagcatgaagaaaaatgcaaggaaataagctcatctcaaggtatctctggctcccaaagaacataggacattaccaacttgaagttagcttctcaggaaactaagacccagctgcttttcaaatcctcaaaatattagtatgaattatagatatagttatagccttcagaactt

SEQ ID NO: 727 - DNA, 402 bp, Homo sapiens
tggcagctaaagagctagggtgaggggagaccagaactccaggcctgtcccatgttcctgtctcacccatatgtggatttcaaccctgggcttagtgtctgcctctagcgacatgggaagagagggatgggtcctctccttcttcttgtcaaatggcccccagagtcccaccaaggtggagctccaggctcctgaccagcaggggctccccaaccctcctgctgtgcccagtctatccctccttccacgcccagcagagctcagcagacttgcccttggccactcttgtgccttcactgctgtgtgtcctggacaggagccagcgtgggcttgctgatcacagagaaagctcacgtggcaaaagaaccagtgagattaacaagtcgaggtttgggatatatc

SEQ ID NO: 728 - DNA, 402 bp, Homo sapiens
ggacacgtgagtatgtgtttctgcgtgtacattgacatgcatgactcagaatgtcacatccatcacaatttcctgtctgaccttggctgaggtatgtctgagttttaatggcctgtaaaatgagggggtgatattagatggcatctgagacccttgccaactccacaattctaggagttggggaatcccaaagatgctgcctatccctggtttgtttgggtgaacaggaacagagaagtcttaagaccacaagcagtgaggttagatgcgagttctgcacctcccctggggccttcagcagctgcattcttggcccagcagaggacttgcctgatctccaggatagcaaaggagctgaggccaaaaagacacatgggctactgctcacccagccccatatta

SEQ ID NO: 729 - DNA, 402 bp, Homo sapiens
tagagctttccttgcaaggctcgagcacaacgcagcagtcactccttgtctccaggcctggctgtagacacaatggaggctcctccttgccatctgcactccagtcaggggaggacaccaatccactaccaaatgaccatagccagcatttactgaatgtagacacactgtaggtagcagatttcaggcacccaatccagagtattgcaggaaggtagcttctatttttctataactgaacttgacttctttcttgggtcctcattctgctgggcatggatattttagttttagtttatttggggtaagctcagccagtgcaaagagtttgcagtctaggtagggtgttctttcccttctcttcccactagagaatttataaggtgccctggcactgttgag

SEQ ID NO: 730 - DNA, 402 bp, Homo sapiens
accctgaggacacctaggagaggccacctcaccacttcttgaaccaggcatgggggatggggaagaagacactggggaaaagctctgagtggtacttcagatcatcctgcctcaggtgttggttctgatcctctcaacgactcccaagggaatatgtcagctccattttgcagactgaaacccgagtctcggaatgacttagtccatggtcacacagttgctaaacatctgagccagagtgaaactctggggtatttgactttaaagtcccagcctttaaatcatcccacacttgcttattccaacttggacttgccggagtcccatagacagaggctactctcccaccgtgctgaagctggtgcatgccatgtttcagtaagagaaaggagggtgcctggg

SEQ ID NO: 731 - DNA, 402 bp, Homo sapiens
tgctaaacatctgagccagagtgaaactctggggtatttgactttaaagtcccagcctttaaatcatcccacacttgcttattccaacttggacttgccggagtcccatagacagaggctactctcccaccgtgctgaagctggtgcatgccatgtttcagtaagagaaaggagggtgcctgggcttcgtctccacccagcgtgcctctcccccagcagctgcaccaggccagctgagggggattttagcccgaatccagggtttctcctacagaagacaaggagtttgggcactgccagaattagaagaacagaaagaaaatgttctggatttctcatcaaatgcccctagcctgagaaatataactaaattcacccttaggtcatcttacaatctgtcct

SEQ ID NO: 732 - DNA, 402 bp, Homo sapiens
ccagcctttaaatcatcccacacttgcttattccaacttggacttgccggagtcccatagacagaggctactctcccaccgtgctgaagctggtgcatgccatgtttcagtaagagaaaggagggtgcctgggcttcgtctccacccaggtgcctctcccccagcagctgcaccaggccagctgagggggattttagcccagaatccagggtttctcctacagaagacaaggagtttgggcactgccagaattagaagaacagaaagaaaatgttctggatttctcatcaaatgcccctagcctgagaaatataactaaattcacccttaggtcatcttacaatctgtcctgccccagtgttccccactcagggaactgctccacccacatcctggtcccca

SEQ ID NO: 733 - DNA, 402 bp, Homo sapiens
ccacccaggtgcctctcccccagcagctgcaccaggccagctgagggggattttagcccgaatccagggtttctcctacagaagacaaggagtttgggcactgccagaattagaagaacagaaagaaaatgttctggatttctcatcaaatgcccctagcctgagaaatataactaaattcacccttaggtcatcttacaagtctgtcctgccccagtgttccccactcagggaactgctccacccacatcctggtccccaaaccagaggcctgggagtcacccttgacatttcctcccctacacccctaatcaatcaaatcctgtttatcctgccctctgagagtctgcaccgaaatctctctcctctccttcccacctaccatggcccagcagctttacc

SEQ ID NO: 734 - DNA, 402 bp, Homo sapiens
cccttaggtcatcttacaatctgtcctgccccagtgttccccactcagggaactgctccacccacatcctggtccccaaaccagaggcctgggagtcacccttgacatttcctcccctacacccctaatcaatcaaatcctgtttatcctgccctctgagagtctgcaccgaaatctctctcctctccttcccacctaccagtggcccagcagctttaccatcatgtctcacggatctctgcaccgctcccaactggcctgtgcgttcactcctgccccctcctccagccctgtgtacactcccttccaccatcctttctatactctcctcaatcctatctgcaccctccttcaaccctgtctgtactctcctccaatcctgtccacacactccaaacaaag

SEQ ID NO: 735 - DNA, 402 bp, Homo sapiens
tttgtccccttccagtccagcagacagatttatttacagaaatctggattttttttttctggaaaaaaagtcaaagagtcactgggggttaagccatttctccagctgatctgagagatcatcccaagcctttgtaatacgcctgtctctcctgccatgctctgttcctatctagcttttcaaaacaaactcttcattttacgaatagttttaaattatagttagagaaaaacttcaaagatagtaagagagttcccatatcctgcacacctggtgagccccattggtaacagcttaggttaacactgtcaccactaatggacaaatgttgcaatattattatttgctcaagtccatacttaactcagacttccttagtttttacctgaagtcctttttcta

SEQ ID NO: 736 - DNA, 402 bp, Homo sapiens
acagatttatttacagaaatctggattttttttttctggaaaaaaagtcaaagagtcactgggggttaagccatttctccagctgatctgagagatcatcccaagcctttgtaatacgcctgtctctcctgccatgctctgttcctatctagcttttcaaaacaaactcttcattttagaatagttttaaattatagttacgagaaaaacttcaaagatagtaagagagttcccatatcctgcacacctggtgagccccattggtaacagcttaggttaacactgtcaccactaatggacaaatgttgcaatattattatttgctcaagtccatacttaactcagacttccttagtttttacctgaagtcctttttctagttcaggatcccacattccattt

SEQ ID NO: 737 - DNA, 402 bp, Homo sapiens
ttgtaatacgcctgtctctcctgccatgctctgttcctatctagcttttcaaaacaaactcttcattttagaatagttttaaattatagttagagaaaaacttcaaagatagtaagagagttcccatatcctgcacacctggtgagccccattggtaacagcttaggttaacactgtcaccactaatggacaaatgttgcagatattattatttgctcaagtccatacttaactcagacttccttagtttttacctgaagtcctttttctagttcaggatcccacattccatttcgtaggcatgtctccttagactcttcttggctgtgacagtttcttaggcttccctctgttttgataaccttgacaatattaaggagatattgggcagatgactgtaga

SEQ ID NO: 738 - DNA, 402 bp, Homo sapiens
ggtgagccccattggtaacagcttaggttaacactgtcaccactaatggacaaatgttgcaatattattatttgctcaagtccatacttaactcagacttccttagtttttacctgaagtcctttttctagttcaggatcccacattccatttcgtaggcatgtctccttagactcttcttggctgtgacagtttcttaggtcttccctctgttttgataaccttgacaatattaaggagatattgggcagatgactgtagaatgtccctcaactgggtcttatctgaagtttttctgatgattgcactggggtttggggaggaagagcacagaggtaaagtaccattcacatcacatcatttgaagagtgcatgttatcaacacgacctatcactgctgat

SEQ ID NO: 739 - DNA, 402 bp, Homo sapiens
tgtgaagtcattttcctccctcccctcttacacactgggctctttggaaggaagtcactgtgtgcaactcacactgaaggagtgggaagttagagatcctccttgagcgtgggccatcttcatgaattattgggaattattctgcataagagatttgtttatattaatatgagctcatggatatttatgttgacactttggtgttataatccaatagtattttacttcttttcttgctcaaattactccacctttgggtactggggctcttgcagttggctcctatgtccccgtcattgaggggtttgggttttgtgtgtgtttgcgtgtgtgtgtgtttgagcacttctttactgttggcaccaaaagatgcttaggcttgctttgagcatctcctgccct

SEQ ID NO: 740 - DNA, 402 bp, Homo sapiens
ctcaaattactccacctttgggtactggggctcttgcagttggctcctatgtccccgtcattgaggggtttgggttttgtgtgtgtttgcgtgtgtgtgtgtttgagcacttctttactgttggcaccaaaagatgcttaggcttgctttgagcatctcctgccctggccctggagccactccaaggaacctccaagaacagcctgattccttttattactggctcctattataattttcataatgggctgtcattttgttttgtctggttttgtttataattataagggtaagtcagctcattgcataaaatatagcaaagatataaaagaataagaatgaaaataagtatcccaaataatccaagcagcaaagaaatccagcgttaacattttggggtat

SEQ ID NO: 741 - DNA, 402 bp, Homo sapiens
atcccataaggttgctggggatgccaaataagttcacaaatggaagaactttacacagtacctagcacagagtaagcagccaattaatattactcgagttactgtttttattacttcatcattcgggactcttccggttgcaagtacaaggaaagccaacccagaatcacttaaacaaaagggaatttattggctcatgtagactgaacttcaacattttacagaatctcattggctccaatgggctcatacgtccatccccaaaccaatcacagtgactgagggattatccaaggatcacactggccactttcacaggttttatccctaaaggaaatcacaggtaatagatgtggggctgcagaaatgcaacatgcacttttccttgaaactgcatccctt

SEQ ID NO: 742 - DNA, 402 bp, Homo sapiens
aaatcacaggtaatagatgtggggctgcagaaatgcaacatgcacttttccttgaaactgcatcccttttccctgaagatgaagcttgaaagaactctaagaggttaagcatggagctgatgggcaagccacaggcagaaagagtagctgtgcagccaggctcctggccagggagggcagataaggaggggaggcaaagtcttggtaaacaggaagctaatctatgggcaagaatcattttcttcagcatcctgacctctcctaaaatgttctccactggtccctgctaggacaaaggaattaccaccagactagagtcaggagtcctgggctggttctgctgtatgacacaggacaggtggcttgcctggtctgggccacagcctcctcccctgttgatga

SEQ ID NO: 743 - DNA, 402 bp, Homo sapiens
gtagctgtgcagccaggctcctggccagggagggcagataaggaggggaggcaaagtttggtaaacaggaagctaatctatgggcaagaatcattttcttcagcatcctgacctctcctaaaatgttctccactggtccctgctaggacaaaggaattaccaccagactagagtcaggagtcctgggctggttctgctgtagtgacacaggacaggtggcttgcctggtctgggccacagcctcctcccctgttgatgagcatgttggttgttccagcaccatgtcagccctagaaatctctgaattcttgaccagatcagtaattgctctcttgcgtttacttttccttcaaataaagagattggcatacaggggaggagcccagtacagacggcatgctt

SEQ ID NO: 744 - DNA, 402 bp, Homo sapiens
ggagggcagataaggaggggaggcaaagtttggtaaacaggaagctaatctatgggcaagaatcattttcttcagcatcctgacctctcctaaaatgttctccactggtccctgctaggacaaaggaattaccaccagactagagtcaggagtcctgggctggttctgctgtatgacacaggacaggtggcttgcctggtcttgggccacagcctcctcccctgttgatgagcatgttggttgttccagcaccatgtcagccctagaaatctctgaattcttgaccagatcagtaattgctctcttgcgtttacttttccttcaaataaagagattggcatacaggggaggagcccagtacagacggcatgcttggctcaggttccagaacccagaaaccag

SEQ ID NO: 745 - DNA, 402 bp, Homo sapiens
ggtccctgctaggacaaaggaattaccaccagactagagtcaggagtcctgggctggttctgctgtatgacacaggacaggtggcttgcctggtctgggccacagcctcctcccctgttgatgagcatgttggttgttccagcaccatgtcagccctagaaatctctgaattcttgaccagatcagtaattgctctcttgacgtttacttttccttcaaataaagagattggcatacaggggaggagcccagtacagacggcatgcttggctcaggttccagaacccagaaaccagacaagagttgggaaaccatgatggtggaggagggtgtgccactccttactagtgcctaatctcttcgagacactaatgtttcagtattatccacagattctgatgc

SEQ ID NO: 746 - DNA, 402 bp, Homo sapiens
ttctgctgtatgacacaggacaggtggcttgcctggtctgggccacagcctcctcccctgttgatgagcatgttggttgttccagcaccatgtcagccctagaaatctctgaattcttgaccagatcagtaattgctctcttgcgtttacttttccttcaaataaagagattggcatacaggggaggagcccagtacagactggcatgcttggctcaggttccagaacccagaaaccagacaagagttgggaaaccatgatggtggaggagggtgtgccactccttactagtgcctaatctcttcgagacactaatgtttcagtattatccacagattctgatgccaggcagcccagatgactggggtcagttattagcatgcttcctggaggtggttccca

SEQ ID NO: 747 - DNA, 402 bp, Homo sapiens
tctgctgtatgacacaggacaggtggcttgcctggtctgggccacagcctcctcccctgttgatgagcatgttggttgttccagcaccatgtcagccctagaaatctctgaattcttgaccagatcagtaattgctctcttgcgtttacttttccttcaaataaagagattggcatacaggggaggagcccagtacagacaggcatgcttggctcaggttccagaacccagaaaccagacaagagttgggaaaccatgatggtggaggagggtgtgccactccttactagtgcctaatctcttcgagacactaatgtttcagtattatccacagattctgatgccaggcagcccagatgactggggtcagttattagcatgcttcctggaggtggttcccag

SEQ ID NO: 748 - DNA, 402 bp, Homo sapiens
atgcttggctcaggttccagaacccagaaaccagacaagagttgggaaaccatgatggtggaggagggtgtgccactccttactagtgcctaatctcttcgagacactaatgtttcagtattatccacagattctgatgccaggcagcccagatgactggggtcagttattagcatgcttcctggaggtggttcccaggtagcaggctacctgcagtctggctggatgggccctgcaccacacttgcttctgggaagctggttttggggttgccacaatctctgaaagaatcactaggccaccctctgagtgggtccttctgtaggaattatggataaaattgttccactagtcttaccttcttggggaacccttcctggattcccaggctgggctgggtgt

SEQ ID NO: 749 - DNA, 402 bp, Homo sapiens
ccttcttggggaacccttcctggattcccaggctgggctgggtgtccctgcagcctagccccacagccctcctgcttctctttctcatcacagtcttgttatctctaccaactgtaggcctgccccactgatggtgtgaataaagggactgggtctctctagcacctagcatagatctgatacatagtgggtgatctctacttgaatgaacgatgaatgaatgaatgaatgaatacatttagataattcagattactctttctagctcagcagtgtaaagcaggaagacatgctgtcaatatgatttagggcaagttttcaaatctctctggacctcagttttacctcttgaaaaataaatataataatttgtccttacttcatgagactattttgaagatt

SEQ ID NO: 750 - DNA, 402 bp, Homo sapiens
tctaccaactgtaggcctgccccactgatggtgtgaataaagggactgggtctctctagcacctagcatagatctgatacatagtgggtgatctctattgaatgaacgatgaatgaatgaatgaatgaatacatttagataattcagattactctttctagctcagcagtgtaaagcaggaagacatgctgtcaatatgactttagggcaagttttcaaatctctctggacctcagttttacctcttgaaaaataaatataataatttgtccttacttcatgagactattttgaagattaaatgagataatgtatacactactactcactgtccttacttgaatattcctaggtccttggtgctacattaggctacatagaatgtatttaaagtaatagagt

SEQ ID NO: 751 - DNA, 402 bp, Homo sapiens
actctttctagctcagcagtgtaaagcaggaagacatgctgtcaatatgatttagggcaagttttcaaatctctctggacctcagttttacctcttgaaaaataaatataataatttgtccttacttcatgagactattttgaagattaaatgagataatgtatacactactactcactgtccttacttgaatattcctaaggtccttggtgctacattaggctacatagaatgtatttaaagtaatagagtggtatttaataaatattcattttctttccccagaactaccttaaattaatttgttgaaaggacagatggatggatggttgatggaagtagcaggcttccagcagcaggggatggagtgagtgtgtggataccgctggatcagcagaaggt

SEQ ID NO: 752 - DNA, 402 bp, Homo sapiens
gctcagcagtgtaaagcaggaagacatgctgtcaatatgatttagggcaagttttcaaatctctctggacctcagttttacctcttgaaaaataaatataataatttgtccttacttcatgagactattttgaagattaaatgagataatgtatacactactactcactgtccttacttgaatattcctaggtccttggtgtctacattaggctacatagaatgtatttaaagtaatagagtggtatttaataaatattcattttctttccccagaactaccttaaattaatttgttgaaaggacagatggatggatggttgatggaagtagcaggcttccagcagcaggggatggagtgagtgtgtggataccgctggatcagcagaaggttataccattt

SEQ ID NO: 753 - DNA, 402 bp, Homo sapiens
atttaataaatattcattttctttccccagaactaccttaaattaatttgttgaaaggacagatggatggatggttgatggaagtagcaggcttccagcagcaggggatggagtgagtgtgtggataccgctggatcagcagaaggttataccattttagagtaactatctcggacttcggagagttcctgggtatgaagcgtttggctttaattaaagtctcagcacagtgttaaatgccattttattttaggtcataattaacactaatgagatgagtggattacaaagagcacacattttgagaaagtgaaaaacaacatctgagcttggtggtttccattttcgcttttccccctcccatgctctgttcaattaaaagttttgagaaaatattacaac

SEQ ID NO: 754 - DNA, 402 bp, Homo sapiens
ggatggatggttgatggaagtagcaggcttccagcagcaggggatggagtgagtgtgtggataccgctggatcagcagaaggttataccattttagagtaactatctcggacttcggagagttcctgggtatgaaggtttggctttaattaaagtctcagcacagtgttaaatgccattttattttaggtcataattaacagctaatgagatgagtggattacaaagagcacacattttgagaaagtgaaaaacaacatctgagcttggtggtttccattttcgcttttccccctcccatgctctgttcaattaaaagttttgagaaaatattacaaccatactccttgtctttgtggtaatgaagcatattaatttgaatgtgatgaatacaatattccac

SEQ ID NO: 755 - DNA, 402 bp, Homo sapiens
gttataccattttagagtaactatctcggacttcggagagttcctgggtatgaaggtttggctttaattaaagtctcagcacagtgttaaatgccattttattttaggtcataattaacactaatgagatgagtggattacaaagagcacacattttgagaaagtgaaaaacaacatctgagcttggtggtttccattttctgcttttccccctcccatgctctgttcaattaaaagttttgagaaaatattacaaccatactccttgtctttgtggtaatgaagcatattaatttgaatgtgatgaatacaatattccactgacttttttattcccttatctacaaaagtttaaaataatggaccaattaaaccaggagagaagaatgcagggtttgcctg

SEQ ID NO: 756 - DNA, 402 bp, Homo sapiens
ttataccattttagagtaactatctcggacttcggagagttcctgggtatgaaggtttggctttaattaaagtctcagcacagtgttaaatgccattttattttaggtcataattaacactaatgagatgagtggattacaaagagcacacattttgagaaagtgaaaaacaacatctgagcttggtggtttccattttcagcttttccccctcccatgctctgttcaattaaaagttttgagaaaatattacaaccatactccttgtctttgtggtaatgaagcatattaatttgaatgtgatgaatacaatattccactgacttttttattcccttatctacaaaagtttaaaataatggaccaattaaaccaggagagaagaatgcagggtttgcctgg

SEQ ID NO: 757 - DNA, 402 bp, Homo sapiens
ttacaaccatactccttgtctttgtggtaatgaagcatattaatttgaatgtgatgaatacaatattccactgacttttttattcccttatctacaaaagtttaaaataatggaccaattaaaccaggagagaagaatgcagggtttgcctggggatccaattcagcaaccagagaactgaaagaacaaaattttttgacaggagtctgggccagacttcatcccttacctatagctgacaaacagtaagtcaaattgggcagatgtggaccagcgcagaacacatactatattgaggatcgaaaggccaggttccagaccgtcctctaatattttcttagtgaatatttgttggatgaatgcatggatgggtggatgaatagatggatggatggacagatg

SEQ ID NO: 758 - DNA, 402 bp, Homo sapiens
tctgggccagacttcatcccttacctatagctgacaaacagtaagtcaaattgggcagatgtggaccagcgcagaacacatactatattgaggatcgaaaggccaggttccagaccgtcctctaatattttcttagtgaatatttgttggatgaatgcatggatgggtggatgaatagatggatggatggacagatggacaggagagagagatggatgaatggattgttggatgaagttgaaagatgaaggtagatgacctcccatggtctgattcttcctaaggtagcaaattaagcctaggatgggctgacctaacccttccaaggacttagaagtcagggcaagaacttacagggaagggttcagttctctgacctcactaccctagaggcataaacta

SEQ ID NO: 759 - DNA, 402 bp, Homo sapiens
gagatggatgaatggattgttggatgaagttgaaagatgaaggtagatgacctcccatggtctgattcttcctaaggtagcaaattaagcctaggatgggctgacctaacccttccaaggacttagaagtcagggcaagaacttacagggaagggttcagttctctgacctcactaccctagaggcataaactataaattagtagagttggcctgagctcagtttccctgggagctctgctctaaagcagagccccttgaccctgcaccaatttggttaacccgagtaaggctgagcttcccccagcaggagctcctgctttggaagagaacatcctgggccaggcgcagtggctcacgcctgtaatcccagcactttgggaggctgaagcgggtggaccgc

SEQ ID NO: 760 - DNA, 402 bp, Homo sapiens
aaacccattgtggccaggctagacaaatccttaacacggtctacaatattctgcatggcatggcccctgggtgcctcccaacctgatctgtcacacaccacctccacctttgcctgttccctgggccctagcactaacctttggttcattcctagacaccttttcagcacttaggcccccacagccctcagaacctttacagcttgctgtctcttttgctttaaatgttcttgccccacctaccacctagttaatgccttttcctccttcagctcttagttgaagcatcacttcctcaaggagggcagccctgatgaaactcattatgcaaactccagcctgggttgggccttatctttatgctgtcatggccctgagtattcttcctttatggcaccaatc

SEQ ID NO: 761 - DNA, 402 bp, Homo sapiens
caaatccttaacacggtctacaatattctgcatggcatggcccctgggtgcctcccaacctgatctgtcacacaccacctccacctttgcctgttccctgggccctagcactaacctttggttcattcctagacaccttttcagcacttaggcccccacagccctcagaacctttacacttgctgtctcttttgctttaaagtgttcttgccccacctaccacctagttaatgccttttcctccttcagctcttagttgaagcatcacttcctcaaggagggcagccctgatgaaactcattatgcaaactccagcctgggttgggccttatctttatgctgtcatggccctgagtattcttcctttatggcaccaatcacggcttatatgatatacttatg

SEQ ID NO: 762 - DNA, 402 bp, Homo sapiens
cttagatggtaaactacagttgctctcaagcagttcacaatgtaacaaaaaagagacacaaatacacagtgacaatacagtgtgtcgagtgctacaatagatggaggggtgcagttttatggatgtggagaagaaatccttctattcctcactggaggcttcactaaggagatattccctaagctgcttctggaaggaaaacggtattggccaagaaaataagggtggaggcagaatttcaggtgaaaggaccagcatatgcaaaggctcagagggcagagcctggcactggaaacaaaatgcaagtcacttcgtggactgagacctggatgaggacatggggctatgagagatgaggctggggagggagacaggggccagatcacagaggcctttcaatga

SEQ ID NO: 763 - DNA, 402 bp, Homo sapiens
atggaggggtgcagttttatggatgtggagaagaaatccttctattcctcactggaggcttcactaaggagatattccctaagctgcttctggaaggaaaaggtattggccaagaaaataagggtggaggcagaatttcaggtgaaaggaccagcatatgcaaaggctcagagggcagagcctggcactggaaacaaaatgtcaagtcacttcgtggactgagacctggatgaggacatggggctatgagagatgaggctggggagggagacaggggccagatcacagaggcctttcaatgacagcaacatatggcagctgcagagacagcatggaagggactggcatggtgagacctgtgatatggagaactccctctcgaaggggttcagaaaagagatg

SEQ ID NO: 764 - DNA, 402 bp, Homo sapiens
gggagggagacaggggccagatcacagaggcctttcaatgacagcaacatatggcagctgcagagacagcatggaagggactggcatggtgagacctgtgatatggagaactccctctcgaaggggttcagaaaagagatgtccatatttcaagtgaaggacttcctcccctggagaaactgaggctctgccccagggctgttccatcagactccttcccagaatccaaacgcttccaaaggatgttcagtgtggctgaccttgcttattcattgtggggagaattaatttcagggtggagaattttaaaaaaatataagattaagcagtgtaatcagctgctgctgagagttgcaaatgcaataaataataatagcattgagagctgtttttaataactca

SEQ ID NO: 765 - DNA, 402 bp, Homo sapiens
gcctttcaatgacagcaacatatggcagctgcagagacagcatggaagggactggcatggtgagacctgtgatatggagaactccctctcgaaggggttcagaaaagagatgtccatatttcaagtgaaggacttcctcccctggagaaactgaggctctgccccagggctgtccatcagactccttcccagaatccaaactgcttccaaaggatgttcagtgtggctgaccttgcttattcattgtggggagaattaatttcagggtggagaattttaaaaaaatataagattaagcagtgtaatcagctgctgctgagagttgcaaatgcaataaataataatagcattgagagctgtttttaataactcaccagtgtaatttagcctcggcttcttaga

SEQ ID NO: 766 - DNA, 402 bp, Homo sapiens
agggagggagggagggagggagggagggaaggagggaaatatttaatagttaagttacatccacaggtttgattataaatgtgtgtattgaattggaatttctgttgaaattctgatcccttctagacaaagaaggtaaaaattgaaacatgtcaatggatatctaaatatcattactcactggctttatttgcaaatggcttttccattgacaacagttacattttgttcaaagcaacaaatgattggcgctgacaatccacaggaacatggtgcagtcattaatgaatgtgctcattattcctccctgccgggaggcatcgactcccgttctccagcctgttttaagcagacagacctacatctgcacctgtcagcttggaaccctagtaggggaggggg

SEQ ID NO: 767 - DNA, 402 bp, Homo sapiens
tgtgtattgaattggaatttctgttgaaattctgatcccttctagacaaagaaggtaaaaattgaaacatgtcaatggatatctaaatatcattactcactggctttatttgcaaatggctttccattgacaacagttacattttgttcaaagcaacaaatgattggcgctgacaatccacaggaacatggtgcagtcatgtaatgaatgtgctcattattcctccctgccgggaggcatcgactcccgttctccagcctgttttaagcagacagacctacatctgcacctgtcagcttggaaccctagtaggggagggggatgctgatgtgatggagaatgaagaatgggccctgcaggctgacattttgggagagtaggttctgaaatttatcccaaagg

SEQ ID NO: 768 - DNA, 402 bp, Homo sapiens
gacctacatctgcacctgtcagcttggaaccctagtaggggagggggatgctgatgtgatggagaatgaagaatgggccctgcaggctgacattttgggagagtaggttctgaaatttatcccaaaggacatggaatcctggaagcagggttcaagatcctcccaaaattgatctcccaggatgcttggaatgattgttcctgagggttttgtaaaatgccaggggaaaaccaggaagcttctctccagttgtcttgcctccttcctctccagtctccatggagctgactttgagaattaactcctgagggacagagaccctgggatggagagccagccctgctggattccacaaggtgctgcttaaagcacaacacctcttcccaatgacaggttctgaaa

SEQ ID NO: 769 - DNA, 402 bp, Homo sapiens
aatgaagaatgggccctgcaggctgacattttgggagagtaggttctgaaatttatcccaaaggacatggaatcctggaagcagggttcaagatcctcccaaaattgatctcccaggatgcttggaatgattgttccgagggttttgtaaaatgccaggggaaaaccaggaagcttctctccagttgtcttgcctccttccgtctccagtctccatggagctgactttgagaattaactcctgagggacagagaccctgggatggagagccagccctgctggattccacaaggtgctgcttaaagcacaacacctcttcccaatgacaggttctgaaagaaggccttgtagctagatgcacagagggttttgttttgtttttttttttttaacctttcagca

SEQ ID NO: 770 - DNA, 402 bp, Homo sapiens
aggattacaggtgggagggagggaggaagggagatatcattattattgtgcaattgttatcattatataactaatttaaacaaacccatcctgtgcccacaaaagggcaccaagataaaggctaagataaagaacacacgaatcattttcccattttcgtcagtgatgggaatggtaatgattttctctctgaaccataactcatcttgcagttaaataattgctttctgatagaatcaggagctctgagatggtgctctgaggagttctttcatttctttcgcaccttttaaagaaaagaaaacttcaagtgcaattattggcattattttaataccgactgcagcagaacattctggaaaatgaggcccctatcaaattagtttttccaaatgaggttta

SEQ ID NO: 771 - DNA, 402 bp, Homo sapiens
tcatttctttcgcaccttttaaagaaaagaaaacttcaagtgcaattattggcattattttaataccgactgcagcagaacattctggaaaatgaggcccctatcaaattagtttttccaaatgaggtttagacagtaccttaccaggagaaccactcagaaagcccccatggcagcagcaagccctgttgagtcaagggctacatggatgtcacactgcacatgtgttttcagataactaagtgaactgctccgatcttgtgggtcattgcaccacggggcctctccatttacttcaggttacacagcaacaagcaagctgagagcagcagaagtagctagctaaaattgcatttgattttgtgactgctagaggccaatactcaagtgaagtttaagcaa

SEQ ID NO: 772 - DNA, 402 bp, Homo sapiens
gccctgttgagtcaagggcacatggatgtcacactgcacatgtgttttcagataactaagtgaactgctccgatcttgtgggtcattgcaccacggggcctctccatttacttcaggttacacagcaacaagcaagctgagagcagcagaagtagctagctaaaattgcatttgattttgtgactgctagaggccaatacatcaagtgaagtttaagcaaaaacaaatcatactcagctgaaaacatttgcctggaagaaagatctgtggctggagaattggagttcatgcacccagcaatttccagaggaagtctgattcccctacctgaagtaacactccttcctctccccagatccagatctccagactatacgtactcaatatatgacttgtccatgg

SEQ ID NO: 773 - DNA, 402 bp, Homo sapiens
gacaatccagaaggggagctgtctgtgaagtcagaattcttggaagaatgtaagtctttacacagtaacagcaaagcagacagtgggaaccactactctgccttcttgcatcattctttcctagaaataccagaaagcagtgagggattaagtctaattcctggcacctgaccttatatctaacagatgctcagtattaccgtgttgatgggacctcactgggaatgttttgtgtgcagtacaaaagggcaatagatgaaactttgggacgggagcccaggaaaatggctgagaggagagcttatgcctagcttatgcatgagcttgcaaaaagggagaatacacgggagggaagatcagcaacagcatgagttttataaggcagagagttgttgggaagga

SEQ ID NO: 774 - DNA, 402 bp, Homo sapiens
attacctgttgatgggacctcactgggaatgttttgtgtgcagtacaaaagggcaatagatgaaactttgggacgggagcccaggaaaatggctgagaggagagcttatgcctagcttatgcatgagcttgcaaaaagggagaatacacgggagggaagatcagcaacagcatgagttttataaggcagagagttgttggagaaggaagcagcagggagaggggaaggagtaagtagaaacctagaagagatacagctaagataagccaagagaacaaagtattgacttaccagaaacatggaagtcttcctgcttctaatttagttccgcatatctggatatgtgaatgcctaaaatcccattaagcccagtgggttaattattacacttgctagggcccc

SEQ ID NO: 775 - DNA, 402 bp, Homo sapiens
catatgtaggtatccttacaagtggaatttctgaataaatggatatatacaatttatttatgaatttaccttcctacaagtgattcaagagagtgtctttgctccacagtgttgtcaatatagtgtattctcaaaatctgacaccaatatgtgtgaagtgcctgctctgttcccacactttacacaggttctcttatttgacgttaagtttatttaagaagaggaaactgggcctcatggagatctaggaacttgcccaaggacaggtctctgtgactctaagagtgcaatcttcccttttccccatgtcaagcacctttccccaccaggctcactgctgacaatccagtgtacgaagaagggaaattacccccacagagcccaaaagtttaggacatgccg

SEQ ID NO: 776 - DNA, 402 bp, Homo sapiens
cagtgatacttagccagcctgattacccatctaataatttctgatactaatataaaaccttcccaaagacaaatataactgagacgcactccagcttaccatagctttcctggtggtacagtttccagggacatttcactgtgtcaaagcagggaccacatatgttccagaccagcttgttgggtttttcactgggaagtagaagacaaattgttgtccctttgaaaaagcatctttcatctctccatctatctgcgatctaaagcaatggggctctttctgtatgtctttcaaatggtctacactgacacacgttttctctgagctgccgagagaatatgccatgagatgttgccagtgatggttacactcagctagcagaagattagggactggttaaac

SEQ ID NO: 777 - DNA, 402 bp, Homo sapiens
ttgccggtgcgccagggtgctgtgaggatgtgggcagagggcgagtccgaagggctccagacactgggaatagtggtggtcgtgtgctcctccctgaaacttttgcactacctcggactgattgacttgtcagacggtaagcgaaccctggagcttccccgttttctgtgaatgtgtttttgtggcttcggttgctgtgacgagtcgtttcgaaaatgcacggaaatgagggcggagacccgagagatttgaaaaagccgggctgaaacagcgtggtattggtccccgcctccccagtcgcgccccagtgctgcgctgtccgtcgtgctgaaatgtggtgcgcctggggagtgcgggagccaggaagttagggtctcctgctccggccctatgagcatgtga

SEQ ID NO: 778 - DNA, 402 bp, Homo sapiens
tctgtgaatgtgtttttgtggcttcggttgctgtgacagtcgtttcgaaaatgcacggaaatgagggcggagacccgagagatttgaaaaagccgggctgaaacagcgtggtattggtccccgcctccccagtcgcgccccagtgctgcgctgtccgtcgtgctgaaatgtggtgcgcctggggagtgcgggagccaggaacgttagggtctcctgctccggccctatgagcatgtgagtcttgatggattattagctatgggtgaggccagcacaacacatcacaattctctctgaagctgtctggtaactacgtatattgttgatggaagccagtgacttttaaaagccattatgttgattaacttttttaaagaagtttaggagattatatggaggtaa

SEQ ID NO: 779 - DNA, 402 bp, Homo sapiens
tcgaaaatgcacggaaatgagggcggagacccgagagatttgaaaaagccgggctgaaacagcgtggtattggtccccgcctccccagtcgcgccccagtgctgcgctgtccgtcgtgctgaaatgtggtgcgcctggggagtgcgggagccaggaagttagggtctcctgctccggccctatgagcatgtgagtcttgactggattattagctatgggtgaggccagcacaacacatcacaattctctctgaagctgtctggtaactacgtatattgttgatggaagccagtgacttttaaaagccattatgttgattaacttttttaaagaagtttaggagattatatggaggtaaaaacctttgtaaaatgctaatcacagtgtctgacaattagaaca

SEQ ID NO: 780 - DNA, 402 bp, Homo sapiens
caacacatcacaattctctctgaagctgtctggtaactacgtatattgttgatggaagccagtgacttttaaaagccattatgttgattaacttttttaaagaagtttaggagattatatggaggtaaaaacctttgtaaaatgctaatcacagtgtctgacaattagaacacatttaataaatgtcagtttctttgctcagacccttataagaacccttattccaaagccacctcctcagctctgacttcagctccattccttagtgagaatggggttataaatccaggttaacccgattgtttaggattagaaagtgatttggtttccaacgttgaaggagttcaagaaacaaagagttttatttttcctccttatgagatattgttccaaatagaacac

SEQ ID NO: 781 - DNA, 402 bp, Homo sapiens
atggaagccagtgacttttaaaagccattatgttgattaacttttttaaagaagtttaggagattatatggaggtaaaaacctttgtaaaatgctaatcacagtgtctgacaattagaacacatttaataaatgtcagtttctttgctcaacccttataagaacccttattccaaagccacctcctcagctctgacttcacgctccattccttagtgagaatggggttataaatccaggttaacccgattgtttaggattagaaagtgatttggtttccaacgttgaaggagttcaagaaacaaagagttttatttttcctccttatgagatattgttccaaatagaacacagtttgtctagatgatttttgtcacttaaaattaggctccaggaaagattc

SEQ ID NO: 782 - DNA, 402 bp, Homo sapiens
tgctaatcacagtgtctgacaattagaacacatttaataaatgtcagtttctttgctcaacccttataagaacccttattccaaagccacctcctcagctctgacttcagctccattccttagtgagaatggggttataaatccaggttaacccgattgtttaggattagaaagtgatttggtttccaacgttgaaggagcttcaagaaacaaagagttttatttttcctccttatgagatattgttccaaatagaacacagtttgtctagatgatttttgtcacttaaaattaggctccaggaaagattccaaatttcatgagcaattgggctcataaaacaagatcaaactccaatagtgtatatccaaagtatgtataatgtgtattcggtgtatattc

SEQ ID NO: 783 - DNA, 402 bp, Homo sapiens
ggctccaggaaagattccaaatttcatgagcaattgggctcataaaacaagatcaaactccaatagtgtatatccaaagtatgtataatgtgtattcggtgtatattcttccaccactgcatggtgtagacagaatttctcttccaaggggcaccacatgacaaaaccgtacataataatgaaatgcatttgtagacaaaaggactagctaaaataccaactgaaagtgggaagaccagaaactgaagtgtaagatgaggtaagccctggagtaagagtcaagaaatccactttctatccataatctgtctcggtttaatgttggtcaagtcattttttaaaaaattctaggtcttggtttccttatgatgactttagatctctgttccttggaattctaga

SEQ ID NO: 784 - DNA, 402 bp, Homo sapiens
tctcttccaaggggcaccacatgacaaaaccgtacataataatgaaatgcatttgtagacaaaggactagctaaaataccaactgaaagtgggaagaccagaaactgaagtgtaagatgaggtaagccctggagtaagagtcaagaaatccactttctatccataatctgtctcggtttaatgttggtcaagtcatttttataaaaaattctaggtcttggtttccttatgatgactttagatctctgttccttggaattctagagtgatccaaaggtttctttgaattcagttttgtgggttgagacgggcagccagactgtgagtccctcagctctgcttcaaccagaacagctccactttactgttcagcatgttagccctgtatgtaaggatgttttt

SEQ ID NO: 785 - DNA, 402 bp, Homo sapiens
gaagtgtaagatgaggtaagccctggagtaagagtcaagaaatccactttctatccataatctgtctcggtttaatgttggtcaagtcattttttaaaaaattctaggtcttggtttccttatgatgactttagatctctgttccttggaattctagagtgatccaaaggtttctttgaattcagttttgtgggttgagactgggcagccagactgtgagtccctcagctctgcttcaaccagaacagctccactttactgttcagcatgttagccctgtatgtaaggatgttttttagctttagctaaaatttagtgactctatgaccctaaggccctgcttccctgagattttgaaagctgaagcacattcggaaaactttttcttccttaaaaatcacc

SEQ ID NO: 786 - DNA, 402 bp, Homo sapiens
ttctttgaattcagttttgtgggttgagacgggcagccagactgtgagtccctcagctctgcttcaaccagaacagctccactttactgttcagcatgttagccctgtatgtaaggatgttttttagctttagctaaaatttagtgactctatgaccctaaggccctgcttccctgagattttgaaagctgaagcacattctggaaaactttttcttccttaaaaatcacctgaaatctgacaatctggaagactagttctgtctgctccagcccttggtcccttagatgtgcttttctgaagatccaaactcaacctgccagtcaatataccaactgagcagagcccctgttctccaccagatttcaagagaacatgttccattcctgttcagagcttcag

SEQ ID NO: 787 - DNA, 402 bp, Homo sapiens
taaatatcatgattccttttatataaggaagaagacagatttagagaagttaaataaaatttccaaaaatgcagcaatagcaaggtggaggtatttgtctctaaaatttcaccctctgttctgtacaccaagtacctcagcaagtaatccagttccagatgggatctgcagtctgccattaagtctttaccacacataggcttcttatgctagagcccttaccatatggtccaaaatgccatttttaatgtgtatttgatatggagactctgttcacaatttgagtactaaagagagaataccacctcctagtagatacaccaggaccaatgtaatgctgtcattctaaggagagcagtggaacatctccaaagaacccatctgtagtcttccttcggccct

SEQ ID NO: 788 - DNA, 402 bp, Homo sapiens
ccttgatcttattcctattttatttttaaggtttttttttttttcttcgagactaaatctcactctatcacccaagctggagtgcagtggcatgatatcagttcattgcaacctctgcctcccggactcaagcgattctcctcactcagcatcccaagtatctgggactacaggcatacaccactatgcccagctagtgtagtgtgtgtgtgtgtgtgtgtgtgtgtgtgtgtgtgtgtgtgttagtagagacagggtttcaccatgttgcccagggtggtcttgaactccagagctcaggcgatccacctgccgaggcctcccaaagtgctgggattacaggcatgagccacagcgcctggccaatcttttagggataattttagaacagtatacagatat

SEQ ID NO: 789 - DNA, 402 bp, Homo sapiens
agaaggattcctccttgcctcttccagcttttggtagctccagtgttctttggcttgtggcagcatcactccaatctcagcctctagtttgtggtaatgtattatgacagtcttaggaaaataatacatcagtatttggaaatgtttcttcatttgccacaatatgatatcaaataaaatacatccacttaaaagttcagagtatggatacacccattgatttggaatgctagtgaatgtaaaggcttaggtcaacttctctctgcagttccaaggaggatgagaaatagcagccttgacctcccaccagcgggagtttccctccttcatccctggtcactggccacacaaggacctggcatctcccagtaaatgtgttcctctgcaacctgagccacaaac

SEQ ID NO: 790 - DNA, 402 bp, Homo sapiens
cctccttgcctcttccagcttttggtagctccagtgttctttggcttgtggcagcatcactccaatctcagcctctagtttgtggtaatgtattatgacagtcttaggaaaataatacatcagtatttggaaatgtttcttcatttgccacaatatgatatcaaataaaatacatccacttaaaagttcaggtatggatacgacccattgatttggaatgctagtgaatgtaaaggcttaggtcaacttctctctgcagttccaaggaggatgagaaatagcagccttgacctcccaccagcgggagtttccctccttcatccctggtcactggccacacaaggacctggcatctcccagtaaatgtgttcctctgcaacctgagccacaaacctctctctc

SEQ ID NO: 791 - DNA, 402 bp, Homo sapiens
aactatgatcaacaaataagactgactccagatcccactctgccaactgcctacctaatacccagactcttgcagctgagagagtctcttctaaaatccagcccaaaaggcacactagatgtgaggaccagaatatcttgtattttgtagtctattatagcaagcataataaacttatttgtttgagaccgagtctcactcgtgtcgcccaggctgaagtacagtggcacgatctcagctcactgaaacctctgcctcccgggtttaagcgattctactgcctcagcctcctgagtagctgggattacaggcatgtgccaccgtgcctggctaatttttgtatttttagttgagacatggcttccccatgttgaccaggctagcctcgaactcctgacctca

SEQ ID NO: 792 - DNA, 402 bp, Homo sapiens
atgatcaacaaataagactgactccagatcccactctgccaactgcctacctaatacccagactcttgcagctgagagagtctcttctaaaatccagcccaaaaggcacactagatgtgaggaccagaatatcttgtattttgtagtctattatagcaagcataataaacttatttgtttgagaccgagtctcactctgtctgcccaggctgaagtacagtggcacgatctcagctcactgaaacctctgcctcccgggtttaagcgattctactgcctcagcctcctgagtagctgggattacaggcatgtgccaccgtgcctggctaatttttgtatttttagttgagacatggcttccccatgttgaccaggctagcctcgaactcctgacctcaggtg

SEQ ID NO: 793 - DNA, 402 bp, Homo sapiens
actgactccagatcccactctgccaactgcctacctaatacccagactcttgcagctgagagagtctcttctaaaatccagcccaaaaggcacactagatgtgaggaccagaatatcttgtattttgtagtctattatagcaagcataataaacttatttgtttgagaccgagtctcactctgtcgcccaggctgaagtacgagtggcacgatctcagctcactgaaacctctgcctcccgggtttaagcgattctactgcctcagcctcctgagtagctgggattacaggcatgtgccaccgtgcctggctaatttttgtatttttagttgagacatggcttccccatgttgaccaggctagcctcgaactcctgacctcaggtgatccacccacctcggc

SEQ ID NO: 794 - DNA, 402 bp, Homo sapiens
aacctctgcctcccgggtttaagcgattctactgcctcagcctcctgagtagctgggattacaggcatgtgccaccgtgcctggctaatttttgtatttttagttgagacatggcttccccatgttgaccaggctagcctcgaactcctgacctcaggtgatccacccacctcggcctcccaaagtgctgggattacaggctgtgagccactgcccagccgataaactttaaaattactttttctattccatatcatagattctgggaggaaacaaggcccaatttgagtaaaagcaactgcatttagctggcttgaacttcttcagagaaagaacaacataaaatattcagctcatctgattttttaatgacatttcctttttatttatattcaattacac

SEQ ID NO: 795 - DNA, 402 bp, Homo sapiens
attctcccttttttaaaccatcccttattctacagatcaggtgaaagtacttgttgctggcctgtacttcccatccccacttttgtccccaggacaaagtactatcaggatactagcattcagagtgagcagattcctagtactgacataaggaggatcaccatctaatttttaaattttaaaaaatgaacacaaagtctagttagaggaatgaaatgaacctgctttgtaggtacataatatttctctctccagagagaaaggaggagagcacacataagataggaagatgagagctacaataaatgagagaagagagaaactgtcagaaatagcagggcagaaagagggaaagaggtgagaatgagagagagggggagggaggaacagaggaagatgcga

SEQ ID NO: 796 - DNA, 402 bp, Homo sapiens
ttagctaattaacagtttgcaaattgccaattgttttttgtcccgcattctccagagactttacactgcaaaggcagaccacagcagcccaccttacacttgagttgtggccaaagcaccatccccaccagacaaagccagccccacagctgaccccggcctgtgagtgtctgaaaactggctgtaaagaacattctgtcctagttacttcctcagtaaactctggggctgggcactggaggttttctgaaaggaagtgtttggtgtctcacacagccatgtgcttagtatattccatgcagcactccactgagccagtgcccttgaaatgagcaagcactgcagccatcctcctttatttccctcaaggcaatatccaaggattaaaaagtcagagccgtc

SEQ ID NO: 797 - DNA, 402 bp, Homo sapiens
tcgtcaatcactcttaaaaatccggtttctccttaggcaatcattttgttttgattttatgtgtaaaaaaacctgagtaaattttttttttttttgagatggagtcttgctctgttgctcaggctagagtacagtggcatgatttctgctcactgcaacctccgcctcccgggttcaagcgattctcctgcctcagcctccttgagtagctgggactacaggtgcccaccaccatgcctggctaatttttgtatttttggtagagacagggtttcatcatactggccaggctggtctcaaactcctgaccttgtgatccacgcacttcggcctcccaaagtaatcactgctgggattacagaagtgagccaccgtgcctggccaaacctaagtaaatgtttt

SEQ ID NO: 798 - DNA, 402 bp, Homo sapiens
taagtttgcttactttaaaagctagagagaagatggttgaggtgatcttgtctccttcagtattcactctgagccatgcctcctgaggaagtttgctttaggggaggcattgctatgttatacactctacgatgcaccagcccttgcctcagaaggcaaggtttgaaccccaacactgtcttttgcaaactgttaccttaaggaaatagattttatctccttaactcactttttacatttgcaaaatgggtaaattgtgactacctcacatggatgtcatgagatgaaatgtaagaatgtgtgtccctggcatatagtaaccactttcgccaaagactgagttatccaactacagacagagaacagctggtggcctaatcaaagggagatacaaaataacaa

SEQ ID NO: 799 - DNA, 402 bp, Homo sapiens
tgtgacacagaggtcactaatcagaatgaaagattgagccagagttgagttgttggaatgtattttggtacatttaggttgttttaagtatatcaatctccattccactcaatggttgagttcagtttcaagttttccaaatgctttatgggaaagtcatatttttctcccattgcagcagggatgccagcgcagccatgctttctcaaccaccaagtagaagcaaagccaaactgacccaagaagatgaacagagggaatccagggagttccaacttgggttcacagctgcaattctcaaaggatggactaagccatgtcacccctccagataacacagtcatattaatagtgaccttttggaggcctccctaaacagcaggtgaagtcccaaaatcatta

SEQ ID NO: 800 - DNA, 402 bp, Homo sapiens
aaacagcaggtgaagtcccaaaatcattagattattcctggcctcaattgtggcccagagggagagccctaagatttttccatgggaacaaagatctaaattctgggactatctgggccatgtccaccctgcaccatttactacaaaatgggctgatcctatggaagcacactacctgtgttgtggtcatatagatcatcatcctggcttctccagggctaaccagttagcatggaaatgggacacccaagaacaagaggatagaaagaagggaagggtggaaagaaggaaggaagaaagggtgggagggagggaagagtggtagttttggaaggaaggagggaatcagagctaaagataatacatgatatgagtcagtgttcaatgtccctgaagattagg

SEQ ID NO: 801 - DNA, 402 bp, Homo sapiens
cattagattattcctggcctcaattgtggcccagagggagagccctaagatttttccatgggaacaaagatctaaattctgggactatctgggccatgtccaccctgcaccatttactacaaaatgggctgatcctatggaagcacactacctgtgttgtggtcatatagatcatcacctggcttctccagggctaaccaagttagcatggaaatgggacacccaagaacaagaggatagaaagaagggaagggtggaaagaaggaaggaagaaagggtgggagggagggaagagtggtagttttggaaggaaggagggaatcagagctaaagataatacatgatatgagtcagtgttcaatgtccctgaagattaggggaatcaagctttgcttccaggag

SEQ ID NO: 802 - DNA, 402 bp, Homo sapiens
aaggaagaaagggtgggagggagggaagagtggtagttttggaaggaaggagggaatcagagctaaagataatacatgatatgagtcagtgttcaatgtccctgaagattaggggaatcaagctttgcttccaggagaattaacacaggagagccaacagagatgtggaaatttaggaagtcagaggagacattctttcacttcattcattcgttcattcattcacttgctcatttttacatgaattgactctagaacagatgctggagatacaaagatgcatgagacttgcccccatcctcaacagtcattcacagtctaatcagaaagagagccttgcatttggaatacaatatggagtaataatacctctgtgttcagcctgcacaaaatactctgtat

SEQ ID NO: 803 - DNA, 402 bp, Homo sapiens
taggaagtcagaggagacattctttcattcattcattcgttcattcattcacttgctcatttttacatgaattgactctagaacagatgctggagatacaaagatgcatgagacttgcccccatcctcaacagtcattcacagtctaatcagaaagagagccttgcatttggaatacaatatggagtaataatacctctgctgttcagcctgcacaaaatactctgtatgcatggtcatatgtcccttgaaacaactttatgaggaagatactactatagtctccatttgacagataaggaaactgaggcttagggaggtcaaataacttgcccaagtaaaacaactagtaagtagctgaaccacaaaacagagattcatgcagaaagctgtacaacagaag

SEQ ID NO: 804 - DNA, 402 bp, Homo sapiens
cttgcccccatcctcaacagtcattcacagtctaatcagaaagagagccttgcatttggaatacaatatggagtaataatacctctgtgttcagcctgcacaaaatactctgtatgcatggtcatatgtcccttgaaacaactttatgaggaagatactactatagtctccatttgacagataaggaaactgaggcttagaggaggtcaaataacttgcccaagtaaaacaactagtaagtagctgaaccacaaaacagagattcatgcagaaagctgtacaacagaagaaaccaggactacatctgcctcaaaggaaccagagaaggcttccaaagaaggcagcattttaaatgggttttgaaggatgtatagcagctatagaggcagagaagaggaaaaa

SEQ ID NO: 805 - DNA, 402 bp, Homo sapiens
actatagtctccatttgacagataaggaaactgaggcttagggaggtcaaataacttgcccaagtaaaacaactagtaagtagctgaaccacaaaacagagattcatgcagaaagctgtacaacagaagaaaccaggactacatctgcctcaaaggaaccagagaaggcttccaaagaaggcagcattttaaatgggtttgtgaaggatgtatagcagctatagaggcagagaagaggaaaaaagtcatttcaaacagaaagaacaggttgtgcattcaaaggtgaattgagaggagagaaaagcatgttcaggaaaagacaagacatttgtggccctgggagctgagatatgccctcgggaaggctggagatgatgtcaaagacgaagattggacaataat

SEQ ID NO: 806 - DNA, 402 bp, Homo sapiens
ttcaacagcaaaaactccacctcccacacaatgtagagttacttcttgctcatttccagtgggtttctgtctttctccacagcctgactccttctcaaaatctctctattcccttccaaatatacattctaaatatttacagaagcttgttattctcctcagagctggcctagagttctcctgatatttcaaagaatttcctaagaatagggaaatctcctgatatttcagagaatatcccaagaatagataaagttccatctgacaaatagatgctcagtaaaatctggtgagtgaatggattaatgcaaaaactaattatcatgctgttcatggcaagggatatgataattttttcaagtccaactctggggcaccctcacttccacgtcacatgattag

SEQ ID NO: 807 - DNA, 402 bp, Homo sapiens
gattaaagagttccttgcctttatagtagtggatgatatctaaggatgatgtaaaatactgggtgttagctaaggttttaccaaacttaaagcctttatgcttcataattccactttattgatgtaggaagacaaatgatagacttactttcaaggtggatagaagggatgcgacctagccaaggctacagcatttctctagtggcaccactgccatgacaaccatcagtttgaatgccttatgggtgcatcctatgggttatgcactggccccaagccataacccctaggactctagagccagcagcaaacacaaaacactgaattaataatgagtgagatctctgttcccatagctgccacaggctaaataagttgagggggtattgtaaaacccaagat

SEQ ID NO: 808 - DNA, 402 bp, Homo sapiens
tccttgcctttatagtagtggatgatatctaaggatgatgtaaaatactgggtgttagctaaggttttaccaaacttaaagcctttatgcttcataattccactttattgatgtaggaagacaaatgatagacttactttcaaggtggatagaagggatgcgacctagccaaggctacagcatttctctatggcaccactagccatgacaaccatcagtttgaatgccttatgggtgcatcctatgggttatgcactggccccaagccataacccctaggactctagagccagcagcaaacacaaaacactgaattaataatgagtgagatctctgttcccatagctgccacaggctaaataagttgagggggtattgtaaaacccaagatgagatcactga

SEQ ID NO: 809 - DNA, 402 bp, Homo sapiens
aggctacagcatttctctatggcaccactgccatgacaaccatcagtttgaatgccttatgggtgcatcctatgggttatgcactggccccaagccataacccctaggactctagagccagcagcaaacacaaaacactgaattaataatgagtgagatctctgttcccatagctgccacaggctaaataagttgagggggttattgtaaaacccaagatgagatcactgagcctctggtatcaaaaaggtgtatttcacagaatgtttagttggacgagagcttgaagagcatggaaacgatctggtatcattctggtcaaagaccagaatttagaccccagttctgccatttgctgactaatgactttgggcaaaatacttaactttcctgagagttagt

SEQ ID NO: 810 - DNA, 402 bp, Homo sapiens
acccctaggactctagagccagcagcaaacacaaaacactgaattaataatgagtgagatctctgttcccatagctgccacaggctaaataagttgagggggtattgtaaaacccaagatgagatcactgagcctctggtatcaaaaaggtgtatttcacagaatgtttagttggacgagagcttgaagagcatggaaaccgatctggtatcattctggtcaaagaccagaatttagaccccagttctgccatttgctgactaatgactttgggcaaaatacttaactttcctgagagttagtttcctcatctataaagtggggtaatataacccaccttgcaggatactggtaggattagttgaaataaattgtaggagaacatttggctcagtgctaagc

SEQ ID NO: 811 - DNA, 402 bp, Homo sapiens
tcctggagggggcgccgaaacaccactcgagatcctcactctcaggaattcaatatagaaaacacattaagacctgtttacatggaactgctgtttataattattgttccctatgggatattccccactgcttcctccaatcctcttttaaactgctcaactaatagagttttcctggcttccccagggagacattcacaagatgctaatagagacataattcaaaaattgcttgatatacatgccctcaattttccccaagaaccacctaagtaaagagccccagacatgcaacacattcattggccagatgcaatttaacatgcgtgggattaaatatacaggctactacagccaggttgtcatcaagcagcagcaggcatggcattttatcctaaggta

SEQ ID NO: 812 - DNA, 402 bp, Homo sapiens
tctcaggaattcaatatagaaaacacattaagacctgtttacatggaactgctgtttataattattgttccctatgggatattccccactgcttcctccaatcctcttttaaactgctcaactaatagagttttcctggcttccccagggagacattcacagatgctaatagagacataattcaaaaattgcttgatatactatgccctcaattttccccaagaaccacctaagtaaagagccccagacatgcaacacattcattggccagatgcaatttaacatgcgtgggattaaatatacaggctactacagccaggttgtcatcaagcagcagcaggcatggcattttatcctaaggtaccaccacggccaaatgcaacaggaaagaagcaggctgct

SEQ ID NO: 813 - DNA, 402 bp, Homo sapiens
atagagacataattcaaaaattgcttgatatacatgccctcaattttccccaagaaccacctaagtaaagagccccagacatgcaacacattcattggccagatgcaatttaacatgcgtgggattaaatatacaggctactacagccaggttgtcatcaagcagcagcaggcatggcattttatcctaaggtaccaccactggccaaatgcaacaggaaagaagcaggctgctgggtgggacccctggaagatcccctcctctgtaatttccactgcaagcttttcccaggccttttcaggcaaagcggggagttttgaaaataaatcccccaggcttggagaagcaaagaatcaatgctaagcagctccggaaataatagcttccatctctctgatatat

SEQ ID NO: 814 - DNA, 402 bp, Homo sapiens
aaaaattgcttgatatacatgccctcaattttccccaagaaccacctaagtaaagagccccagacatgcaacacattcattggccagatgcaatttaacatgcgtgggattaaatatacaggctactacagccaggttgtcatcaagcagcagcaggcatggcattttatcctaaggtaccaccacggccaaatgcaacaaggaaagaagcaggctgctgggtgggacccctggaagatcccctcctctgtaatttccactgcaagcttttcccaggccttttcaggcaaagcggggagttttgaaaataaatcccccaggcttggagaagcaaagaatcaatgctaagcagctccggaaataatagcttccatctctctgatatataaagaggataaggaa

SEQ ID NO: 815 - DNA, 402 bp, Homo sapiens
gccagatgcaatttaacatgcgtgggattaaatatacaggctactacagccaggttgtcatcaagcagcagcaggcatggcattttatcctaaggtaccaccacggccaaatgcaacaggaaagaagcaggctgctgggtgggacccctggaagatcccctcctctgtaatttccactgcaagcttttcccaggccttttctaggcaaagcggggagttttgaaaataaatcccccaggcttggagaagcaaagaatcaatgctaagcagctccggaaataatagcttccatctctctgatatataaagaggataaggaaggcagaaagaaggggcatgatattatgagattgcaacaatacattgcaacattacattaaagaattacagaaagcaagatct

SEQ ID NO: 816 - DNA, 402 bp, Homo sapiens
actgcccaaggttacacgagtagaaatttggtgtccccaccactcctttttattgcagagggaattgacattcagggaatggaaatgcccagcccagaattggggatgtggtctgggaacccaggtctcccatcccactccctcgccctctcaccccctcccgctggtcagtgttctttgtcctctgctggcatccctggaggacgggccagcccccatccccccgacacacacacattgtcccttcaagatggagccaggctgacaccacgtagaatgacctggaagcccccactcagtctaccagtcctccctcctcacacaggaatagatgggagggaaatgaaataagctgccatctgctgtgcatcctctgtgtgccatgctctgggtacccatcta

SEQ ID NO: 817 - DNA, 402 bp, Homo sapiens
tttgtcctctgctggcatccctggggacgggccagcccccatccccccgacacacacacattgtcccttcaagatggagccaggctgacaccacgtagaatgacctggaagcccccactcagtctaccagtcctccctcctcacacaggaatagatgggagggaaatgaaataagctgccatctgctgtgcatcctctgtagtgccatgctctgggtacccatctaatcctcgtgaagaccctgagaagtgagtgttcttcacagactaggcaacaccagaaggcaggtgaagaacgtacagaagctacagagtgcacaggtgacaggtatgagagccaagccattcaaactccctgggtataggacccagctcttcccacgtctctgcctttaccgaatca

SEQ ID NO: 818 - DNA, 402 bp, Homo sapiens
gacaccacgtagaatgacctggaagcccccactcagtctaccagtcctccctcctcacacaggaatagatgggagggaaatgaaataagctgccatctgctgtgcatcctctgtgtgccatgctctgggtacccatctaatcctcgtgaagaccctgagaagtgagtgttcttcacagactaggcaacaccagaaggcagagtgaagaacgtacagaagctacagagtgcacaggtgacaggtatgagagccaagccattcaaactccctgggtataggacccagctcttcccacgtctctgcctttaccgaatcaaacacctgagcacggaagaccctccatcaacatgaactgctttgaattgacatgaacaagcttcaatcaaactataaatgctgaaa

SEQ ID NO: 819 - DNA, 402 bp, Homo sapiens
atctgctgtgcatcctctgtgtgccatgctctgggtacccatctaatcctcgtgaagaccctgagaagtgagtgttcttcacagactaggcaacaccagaaggcaggtgaagaacgtacagaagctacagagtgcacaggtgacaggtatgagagccaagccattcaaactccctgggtataggacccagctcttcccacagtctctgcctttaccgaatcaaacacctgagcacggaagaccctccatcaacatgaactgctttgaattgacatgaacaagcttcaatcaaactataaatgctgaaatttttcaattatagaaagtatttgaaagatcccataaattcccctgtcatatcacgtgagctgcatttactgcagcagacactttttatctcgg

SEQ ID NO: 820 - DNA, 402 bp, Homo sapiens
ccataaattcccctgtcatatcacgtgagctgcatttactgcagcagacactttttatctcgggcttggaggaaggattagcaagaagaaagtggagggggtctgaggaagggctggcagcctagaggaggacagcagcaagaagcaggctggaggcagttctgtgctgccggccttcatgggtgtggcctttggacagcagccttagcaggaatgtggtggagagcagccccattcactccagaggagagcctcaaactcttcaggcagatctagcctaggtagaatcttggcctggcccctccgggatgacaggtgccattgcccaagaatggggaaaaggctgaagtgctccagccaaagaccccaatttatcttcaggacaattttcactggaaacct

SEQ ID NO: 821 - DNA, 402 bp, Homo sapiens
cagcagacactttttatctcgggcttggaggaaggattagcaagaagaaagtggagggggtctgaggaagggctggcagcctagaggaggacagcagcaagaagcaggctggaggcagttctgtgctgccggccttcatgggtgtggcctttggacagcaccttagcaggaatgtggtggagagcagccccattcactccatgaggagagcctcaaactcttcaggcagatctagcctaggtagaatcttggcctggcccctccgggatgacaggtgccattgcccaagaatggggaaaaggctgaagtgctccagccaaagaccccaatttatcttcaggacaattttcactggaaaccttgcctcaccactgcccactttttcagaagtaattagaatgc

SEQ ID NO: 822 - DNA, 402 bp, Homo sapiens
tgaggaagggctggcagcctagaggaggacagcagcaagaagcaggctggaggcagttctgtgctgccggccttcatgggtgtggcctttggacagcaccttagcaggaatgtggtggagagcagccccattcactccagaggagagcctcaaactcttcaggcagatctagcctaggtagaatcttggcctggcccctcctgggatgacaggtgccattgcccaagaatggggaaaaggctgaagtgctccagccaaagaccccaatttatcttcaggacaattttcactggaaaccttgcctcaccactgcccactttttcagaagtaattagaatgctaatctataagaaagatgactattaaaaataaattaataatagataatacattttggcttac

SEQ ID NO: 823 - DNA, 402 bp, Homo sapiens
agcagtgtggcatgattacagttcatatttcaactctgccactcaatgactaatagccaagcactaataatgcagaaaatgtaaatttaaaaaataatcttcctgagattggttatgaaatgcactcaacacagcaccatccacagagaggttctttttaattgctcttttctttcctctcgacacccagaatcacaaagcgatgcctgaaagcgtcacacatatatgtctgtgaccataacatggcattgcacatgcaaaggaaataaataggtgttacccatgtgacaaaggtccatgagctctgtccgcaaaaagctgttgagtttaaagaacaaataattctgaaaaatcttccaggagatgaaatttgtagaactcaagggcagtaaactagctgct

SEQ ID NO: 824 - DNA, 402 bp, Homo sapiens
aatgcagaaaatgtaaatttaaaaaataatcttcctgagattggttatgaaatgcactcaacacagcaccatccacagagaggttctttttaattgctcttttctttcctctcgacacccagaatcacaaagcatgcctgaaagcgtcacacatatatgtctgtgaccataacatggcattgcacatgcaaaggaaataaagtaggtgttacccatgtgacaaaggtccatgagctctgtccgcaaaaagctgttgagtttaaagaacaaataattctgaaaaatcttccaggagatgaaatttgtagaactcaagggcagtaaactagctgctttccaaggacttgtcatagctttattgacttacaatagccaaagataagtcagtattaatcaaaccca

SEQ ID NO: 825 - DNA, 402 bp, Homo sapiens
gagtttaaagaacaaataattctgaaaaatcttccaggagatgaaatttgtagaactcaagggcagtaaactagctgctttccaaggacttgtcatagctttattgacttacaatagccaaagataagtcagtattaatcaaacccattctctagaaaaacctcatcatcactggggccagggcagagaagtgtgacacaagctctctccagcttccccacttcacagcatggttccaccatccacccaattgctaaagcctggatagtcttccttgtcacctcccgatccccttctctaacacccatcccccggccacccaacatcagcaagtctggtggtttctctctgtcacagagattcaagatcttcccctcatctgtctgtttcaaagttaacatc

SEQ ID NO: 826 - DNA, 402 bp, Homo sapiens
caagtctggtggtttctctctgtcacagagattcaagatcttcccctcatctgtctgtttcaaagttaacatcatctctcatccagacagttgcaacactctcctagcaggtccttctgcatctattttttaattaaatttttaaagataaaaacattcctctaaatagaatctgctccagaacccagattaaaaaagaaacgagaagggggaaagaagattagggcatcccagaagctccctatttgccccatttgattcattactccccaaaggtaactgctatcctgacttctagcaacactggttaatttccgttgattttgcactgtatattcatccgtgctgttggacactgtcatacttgattcattcacattgctgtgtaacatttcattgtgt

SEQ ID NO: 827 - DNA, 402 bp, Homo sapiens
attactccccaaaggtaactgctatcctgacttctagcaacactggttaatttccgttgattttgcactgtatattcatccgtgctgttggacactgtcatacttgattcattcacattgctgtgtaacatttcattgtgtgactattttaacatccattttactgttgaacacttgggtaaacttctgctttgaggctacttataaacttgacacttctgcttcccattgctttaaagataagagcccaagtccttgtcagacaggtgaatggtccacacagttagcatcctaggctgggcgcggtagctcacgcctgtaatcccagcactttgggaggccaaggcgggtggatcatgaggtcaggagatcgagaccatcctggccaacatgatgaaaccc

SEQ ID NO: 828 - DNA, 402 bp, Homo sapiens
aaggttgcagtgagccgagattgcaccactacactccagcctgggacagagcaagactctgtctcaaaaaaaaaaaaaaaagccaggctttttctcatctcataatctttgcgcatgctgttccctcttcctgaaactgctttcctaccacttctcacctttatgcttcacctcgtagtgttcatagactctccttccttctctaacttaaaagaggctccttctggtttttccttcatacacttccctcactcttttccttcactgcactaaagatgatttctaattgcatagtcattgatgccagtatttgtttattgtgtcattcctgctgaacagaggatgggcctgacttatttgggaccatgttgctgatgcctggacctaagcctggcacagagt

SEQ ID NO: 829 - DNA, 402 bp, Homo sapiens
agagtaggagctcaacaaatttgttaaatgagtggctgaatggccatactctcaaaggacccacagtctaggagagacagaagaatctttgtctttttgtcttgcagtgggatggaagctgcagggaggggtcttgtcacattgatactgtctggggaagacagaaaaacttcagtttcagaggaggtagcccttgaaacagagatttgagagagggcagcacattgtacaactccatgggcaccatgcacattgtagtccagataaacagagccccttggagatatgtgaggcatgggatagactcagagaaacccaggaaataaccccttcaggcatctgacatgcaaagatgtggaagtgtcaaccaggaagtcatgttgggggaacagcaagtattta

SEQ ID NO: 830 - DNA, 402 bp, Homo sapiens
gaatctttgtctttttgtcttgcagtgggatggaagctgcagggaggggtcttgtcacattgatactgtctggggaagacagaaaaacttcagtttcagaggaggtagcccttgaaacgagatttgagagagggcagcacattgtacaactccatgggcaccatgcacattgtagtccagataaacagagccccttggagagtatgtgaggcatgggatagactcagagaaacccaggaaataaccccttcaggcatctgacatgcaaagatgtggaagtgtcaaccaggaagtcatgttgggggaacagcaagtatttacagaaagtgactgtgtgtgtctgtgtaggagggtgactttgtataggagagataaaacctgtgagctaatcaaggagaagat

SEQ ID NO: 831 - DNA, 402 bp, Homo sapiens
gggatggaagctgcagggaggggtcttgtcacattgatactgtctggggaagacagaaaaacttcagtttcagaggaggtagcccttgaaacgagatttgagagagggcagcacattgtacaactccatgggcaccatgcacattgtagtccagataaacagagccccttggagatatgtgaggcatgggatagactcagacgaaacccaggaaataaccccttcaggcatctgacatgcaaagatgtggaagtgtcaaccaggaagtcatgttgggggaacagcaagtatttacagaaagtgactgtgtgtgtctgtgtaggagggtgactttgtataggagagataaaacctgtgagctaatcaaggagaagatcataaaagaccttcataaagagcatg

SEQ ID NO: 832 - DNA, 402 bp, Homo sapiens
gtcactcctcagggaagcctgccctgaatgcctgcactacaccagggcccctttcccctgcccccatcccagagcaccaaatagctttcccttgcagcacttctcacagctgtcattttatgtttgtgtctgtgattcttaggttaagtccctcatgcaccaaatcataagatctgggaacaaggaccacacctgtcctgcttcatcactgtaatcatcacactgcctgccaaagtgccttgcacatattagatacttagtagttatgtgttccatgaatgactctttaagagatcttctagctgttcttgcaaagaacccattggtaaggttgaacctacaggctgatactttgcactagtctcaggaagagatggtgagtacatgaaattgagtccccca

SEQ ID NO: 833 - DNA, 402 bp, Homo sapiens
gaacccattggtaaggttgaacctacaggctgatactttgcactagtctcaggaagagatggtgagtacatgaaattgagtcccccagaggttaatgcccagtgccccagctaggaaacgtccaaggaggcaatttgaaccccatctgtctggctgcagagcctagccctctaatgcattcaggggtcctagctcctcgaaggatgccactgtgccgtgaacttctttctgaccctcatggctcccagcacagcatccacactcagaagtgcaagatgaatgtttgcagataatgaacataaagctctcaggaaccctcatctcctgagaatctgctttggcccccacagcaggtctgggtgtggaccttccccaatggccttgggaaattatcaacatctc

SEQ ID NO: 834 - DNA, 402 bp, Homo sapiens
aattgagtcccccagaggttaatgcccagtgccccagctaggaaacgtccaaggaggcaatttgaaccccatctgtctggctgcagagcctagccctctaatgcattcaggggtcctagctcctcgaggatgccactgtgccgtgaacttctttctgaccctcatggctcccagcacagcatccacactcagaagtgcaaagatgaatgtttgcagataatgaacataaagctctcaggaaccctcatctcctgagaatctgctttggcccccacagcaggtctgggtgtggaccttccccaatggccttgggaaattatcaacatctccccattagctgttgcaatattaaattgtgtgactggaaatgaatgaataatcccatgggcaagtgagggagac

SEQ ID NO: 835 - DNA, 402 bp, Homo sapiens
tgcattcaggggtcctagctcctcgaggatgccactgtgccgtgaacttctttctgaccctcatggctcccagcacagcatccacactcagaagtgcaagatgaatgtttgcagataatgaacataaagctctcaggaaccctcatctcctgagaatctgctttggcccccacagcaggtctgggtgtggaccttccccaagtggccttgggaaattatcaacatctccccattagctgttgcaatattaaattgtgtgactggaaatgaatgaataatcccatgggcaagtgagggagaccaagcagcagggatttaataacaagtcctgccctttctccaagcagaaggtcttcctaattaaatattaaaaatctatccatacaagcaagagcgaaaaat

SEQ ID NO: 836 - DNA, 402 bp, Homo sapiens
ggttagtgacttacccaaggccaccaggtatcaagtggcaaagttgggatcttaacccagttctatgtggctataaagttcatggaatagaatgctgcagttaagaacatgggctttggcatcaagcagacctgtatttgagccccacctctgctgtttattaactgtggccctgggcagatgaccttacatccttaagtcttctagttctttgtctttaaaagggtggcagaatgtacctcactggttttaggaaggtcacatgagatagtgcacatgaagccctaggcatgggaaaattcttctaaaatgtcagctgccattctgatcactgcaagacccccacccccaatactcccaattgtaccaccccaccccactcaccagtgtctcagaaatgcc

SEQ ID NO: 837 - DNA, 402 bp, Homo sapiens
catgaagccctaggcatgggaaaattcttctaaaatgtcagctgccattctgatcactgcaagacccccacccccaatactcccaattgtaccaccccaccccactcaccagtgtctcagaaatgcctcctccagaaggaaggcatcctgtctaacccactgcttctagccaagctgtctttcttcagaaggtagaaaaagtattgttagtcattgtttaatctttattgagtatataccgccacaccaattgcactgccattcattatctcatttaaatctgacaagagccttgtaaagtagggattattcccaccatttcccagatgttgaaactgaaattgataaacacgacatgttgccatggctacatgaagatctccaagccggaggatctccacc

SEQ ID NO: 838 - DNA, 402 bp, Homo sapiens
aagacccccacccccaatactcccaattgtaccaccccaccccactcaccagtgtctcagaaatgcctcctccagaaggaaggcatcctgtctaacccactgcttctagccaagctgtctttcttcagaaggtagaaaaagattgttagtcattgtttaatctttattgagtatataccgccacaccaattgcactgccacttcattatctcatttaaatctgacaagagccttgtaaagtagggattattcccaccatttcccagatgttgaaactgaaattgataaacacgacatgttgccatggctacatgaagatctccaagccggaggatctccaccctcacctgcctagcttcccagacctctctgcagaaaagggactgacccccaagacagccc

SEQ ID NO: 839 - DNA, 402 bp, Homo sapiens
tcctccagaaggaaggcatcctgtctaacccactgcttctagccaagctgtctttcttcagaaggtagaaaaagattgttagtcattgtttaatctttattgagtatataccgccacaccaattgcactgccattcattatctcatttaaatctgacaagagccttgtaaagtagggattattcccaccatttcccagatagttgaaactgaaattgataaacacgacatgttgccatggctacatgaagatctccaagccggaggatctccaccctcacctgcctagcttcccagacctctctgcagaaaagggactgacccccaagacagccctggcctctgggctccaccccttccacatccatcccagggccgctgaggactgaagagttctccacgt

SEQ ID NO: 840 - DNA, 402 bp, Homo sapiens
tgttgaaactgaaattgataaacacgacatgttgccatggctacatgaagatctccaagccggaggatctccaccctcacctgcctagcttcccagacctctctgcagaaaagggactgacccccaagacagccctggcctctgggctccaccccttccacatccatcccagggccgctgaggactgaagagttctccacagtttgccctttaaagtgacttaaaaataatctttatgaatttcttcatatacaaaatttgtacttactcattgcagcaaatttagaaaatacacataagcaaaaaagaacgtaacagccatccataaccctaactctcagagatcaccactattaaaatgtttattatctaagagagagatgatatagacaaagatgagac

SEQ ID NO: 841 - DNA, 402 bp, Homo sapiens
ctccaagccggaggatctccaccctcacctgcctagcttcccagacctctctgcagaaaagggactgacccccaagacagccctggcctctgggctccaccccttccacatccatcccagggccgctgaggactgaagagttctccacgtttgccctttaaagtgacttaaaaataatctttatgaatttcttcatatacagaaatttgtacttactcattgcagcaaatttagaaaatacacataagcaaaaaagaacgtaacagccatccataaccctaactctcagagatcaccactattaaaatgtttattatctaagagagagatgatatagacaaagatgagacagattgacacagagaagatgggtacatgatagatattttctgttttataacc

SEQ ID NO: 842 - DNA, 402 bp, Homo sapiens
aaagggactgacccccaagacagccctggcctctgggctccaccccttccacatccatcccagggccgctgaggactgaagagttctccacgtttgccctttaaagtgacttaaaaataatctttatgaatttcttcatatacaaaatttgtacttactcattgcagcaaatttagaaaatacacataagcaaaaaagaactgtaacagccatccataaccctaactctcagagatcaccactattaaaatgtttattatctaagagagagatgatatagacaaagatgagacagattgacacagagaagatgggtacatgatagatattttctgttttataacccttgctttttcttgcacttctaggaatttttctgagaactaatctgaaatctgcaca

SEQ ID NO: 843 - DNA, 402 bp, Homo sapiens
ggactgaagagttctccacgtttgccctttaaagtgacttaaaaataatctttatgaatttcttcatatacaaaatttgtacttactcattgcagcaaatttagaaaatacacataagcaaaaaagaacgtaacagccatccataaccctaactctcagagatcaccactattaaaatgtttattatctaagagagagatgtatatagacaaagatgagacagattgacacagagaagatgggtacatgatagatattttctgttttataacccttgctttttcttgcacttctaggaatttttctgagaactaatctgaaatctgcacagggtccccacgtctcggatcctcatcccattgcctcccaccttcttgaactttgcttcaataattatcacac

SEQ ID NO: 844 - DNA, 402 bp, Homo sapiens
gttctccacgtttgccctttaaagtgacttaaaaataatctttatgaatttcttcatatacaaaatttgtacttactcattgcagcaaatttagaaaatacacataagcaaaaaagaacgtaacagccatccataaccctaactctcagagatcaccactattaaaatgtttattatctaagagagagatgatatagacaatagatgagacagattgacacagagaagatgggtacatgatagatattttctgttttataacccttgctttttcttgcacttctaggaatttttctgagaactaatctgaaatctgcacagggtccccacgtctcggatcctcatcccattgcctcccaccttcttgaactttgcttcaataattatcacacctcctttgca

SEQ ID NO: 845 - DNA, 402 bp, Homo sapiens
aatctttatgaatttcttcatatacaaaatttgtacttactcattgcagcaaatttagaaaatacacataagcaaaaaagaacgtaacagccatccataaccctaactctcagagatcaccactattaaaatgtttattatctaagagagagatgatatagacaaagatgagacagattgacacagagaagatgggtacactgatagatattttctgttttataacccttgctttttcttgcacttctaggaatttttctgagaactaatctgaaatctgcacagggtccccacgtctcggatcctcatcccattgcctcccaccttcttgaactttgcttcaataattatcacacctcctttgcatgtttaatcttcccccttttaatgacaactaccaag

SEQ ID NO: 846 - DNA, 402 bp, Homo sapiens
taaaaataacaagactgtattttctttgctgttggctgtccctaaaactgttaacatgggttcccagcctggcacaatgtggtccatgcctgcctcccacatacctgcctcccacccctctgggccttgttcccttcatcccagcctccagacacacctgcctcctgtcatctctagagcaggcttatcttgttctcctgctgggctccttgtagaggatgttccctctgcccagaacgctctccctcactcatcacctgttggtccccttctcctccttccaggctctgtgtcaaggccaccacagagaagccttgcggttatgtttagttcttcctgcctaagttcgcatggtaacccatacctttcctccatcataatttgctcaactgtaatcaaaca

SEQ ID NO: 847 - DNA, 402 bp, Homo sapiens
taacatgggttcccagcctggcacaatgtggtccatgcctgcctcccacatacctgcctcccacccctctgggccttgttcccttcatcccagcctccagacacacctgcctcctgtcatctctagagcaggcttatcttgttctcctgtgggctccttgtagaggatgttccctctgcccagaacgctctccctcactcactcacctgttggtccccttctcctccttccaggctctgtgtcaaggccaccacagagaagccttgcggttatgtttagttcttcctgcctaagttcgcatggtaacccatacctttcctccatcataatttgctcaactgtaatcaaacattatttttaaaaaatcattccagcctgggaaacagtgagaaacccatctct

SEQ ID NO: 848 - DNA, 402 bp, Homo sapiens
ttcccagcctggcacaatgtggtccatgcctgcctcccacatacctgcctcccacccctctgggccttgttcccttcatcccagcctccagacacacctgcctcctgtcatctctagagcaggcttatcttgttctcctgtgggctccttgtagaggatgttccctctgcccagaacgctctccctcactcatcacctgtctggtccccttctcctccttccaggctctgtgtcaaggccaccacagagaagccttgcggttatgtttagttcttcctgcctaagttcgcatggtaacccatacctttcctccatcataatttgctcaactgtaatcaaacattatttttaaaaaatcattccagcctgggaaacagtgagaaacccatctctacaaaataa

SEQ ID NO: 849 - DNA, 402 bp, Homo sapiens
gtccatgcctgcctcccacatacctgcctcccacccctctgggccttgttcccttcatcccagcctccagacacacctgcctcctgtcatctctagagcaggcttatcttgttctcctgtgggctccttgtagaggatgttccctctgcccagaacgctctccctcactcatcacctgttggtccccttctcctccttccagggctctgtgtcaaggccaccacagagaagccttgcggttatgtttagttcttcctgcctaagttcgcatggtaacccatacctttcctccatcataatttgctcaactgtaatcaaacattatttttaaaaaatcattccagcctgggaaacagtgagaaacccatctctacaaaataaaaaataaaaattagcttggca

SEQ ID NO: 850 - DNA, 402 bp, Homo sapiens
ctcactcatcacctgttggtccccttctcctccttccaggctctgtgtcaaggccaccacagagaagccttgcggttatgtttagttcttcctgcctaagttcgcatggtaacccatacctttcctccatcataatttgctcaactgtaatcaaacattatttttaaaaaatcattccagcctgggaaacagtgagaaacctcatctctacaaaataaaaaataaaaattagcttggcattgtggcatctgcccgtggtccctgctactcaggaggctgagatgaaaggatcacttgagcctgggaggttggggctgtggtaagccgtgattgccccattgcactccattctaggcaacagagtgagaccctgtctcaaaaaaaatattattcatttaatat

SEQ ID NO: 851 - DNA, 402 bp, Homo sapiens
acctgttggtccccttctcctccttccaggctctgtgtcaaggccaccacagagaagccttgcggttatgtttagttcttcctgcctaagttcgcatggtaacccatacctttcctccatcataatttgctcaactgtaatcaaacattatttttaaaaaatcattccagcctgggaaacagtgagaaacccatctctacagaaataaaaaataaaaattagcttggcattgtggcatctgcccgtggtccctgctactcaggaggctgagatgaaaggatcacttgagcctgggaggttggggctgtggtaagccgtgattgccccattgcactccattctaggcaacagagtgagaccctgtctcaaaaaaaatattattcatttaatatctgttgccac

SEQ ID NO: 852 - DNA, 402 bp, Homo sapiens
gaccctgtctcaaaaaaaatattattcatttaatatctgttgccaccacaggactgatccctctgtgagggcagagattgttcatgcatggaattgtgatttataagcactggctctggagccaggttgcctgagcacggagccagctgtgccctgcgggacacctgtggcacacttcactcctgggacacctgggacaccgcacacaatagaaatgttcacattttactaggcaatgccagtcacatagtcctacctaatttcaaaagggtaaaaggtacacccaacacgcatcaggaaggaggaggaccagaaattgttggtgacaagcacaaatgaccaccccaatataatattttgtttggaaggcattttattccacaaaaacaacattacaataaa

SEQ ID NO: 853 - DNA, 402 bp, Homo sapiens
ctcaaaaaaaatattattcatttaatatctgttgccaccacaggactgatccctctgtgagggcagagattgttcatgcatggaattgtgatttataagcactggctctggagccaggttgcctgagcacggagccagctgtgccctgcgggacacctgtggcacacttcactcctgggacacctgggacacgcacacaactagaaatgttcacattttactaggcaatgccagtcacatagtcctacctaatttcaaaagggtaaaaggtacacccaacacgcatcaggaaggaggaggaccagaaattgttggtgacaagcacaaatgaccaccccaatataatattttgtttggaaggcattttattccacaaaaacaacattacaataaacacaacaa

SEQ ID NO: 854 - DNA, 402 bp, Homo sapiens
agagattgttcatgcatggaattgtgatttataagcactggctctggagccaggttgcctgagcacggagccagctgtgccctgcgggacacctgtggcacacttcactcctgggacacctgggacacgcacacaatagaaatgttcacattttactaggcaatgccagtcacatagtcctacctaatttcaaaagggtaagaaggtacacccaacacgcatcaggaaggaggaggaccagaaattgttggtgacaagcacaaatgaccaccccaatataatattttgtttggaaggcattttattccacaaaaacaacattacaataaacacaacaacaaaacactggttgcagtagaaccaactttccagacctatctgcacagcacaaccattatccca

SEQ ID NO: 855 - DNA, 402 bp, Homo sapiens
agaaccaactttccagacctatctgcacagcacaaccattatcccactcaaaatgtcatgtttttacccaaaacattaaaattttaaaagcaattcaaacccatagcttaaaaaatgttccaaccagtaataaaaggaaaagtgtgcctcctcctcccaacttccctaccccacaatcgcaagatattatccttataggcagaaaagggtttcaggatttgagatgcaggctgggaggtctgagaagacttcctatagaagacatgacttcaaactctttcttgtatgtgagatttaattttcaaagactcctctgatccaacttaagctttatggtaaatcaccttgggacttaaatgatgagaagcactgctatctcacagtgagaaattcagaagggct

SEQ ID NO: 856 - DNA, 402 bp, Homo sapiens
aaaagcaattcaaacccatagcttaaaaaatgttccaaccagtaataaaaggaaaagtgtgcctcctcctcccaacttccctaccccacaatcgcaagatattatccttataggcgaaaagggtttcaggatttgagatgcaggctgggaggtctgagaagacttcctatagaagacatgacttcaaactctttcttgtactgtgagatttaattttcaaagactcctctgatccaacttaagctttatggtaaatcaccttgggacttaaatgatgagaagcactgctatctcacagtgagaaattcagaagggctgggagttccaagtcagagctctgatctggaaagttccatcaaagcgtcactccaggcttagcggttgccacccaccactcgtcag

SEQ ID NO: 857 - DNA, 402 bp, Homo sapiens
ctatagaagacatgacttcaaactctttcttgtatgtgagatttaattttcaaagactcctctgatccaacttaagctttatggtaaatcaccttgggacttaaatgatgagaagcactgctatctcacagtgagaaattcagaagggctgggagttccaagtcagagctctgatctggaaagttccatcaaagcgtcacatccaggcttagcggttgccacccaccactcgtcagactaaacagcctcagagccctgtgacctgctaatgtattcacaaactaactcagctaattaatcccagctcattcatcctctcaaactatgcaagtcttccagctggccctccggcttgctgccctggctaatggagtgttacgtggactctctgtaggttgcacc

SEQ ID NO: 858 - DNA, 402 bp, Homo sapiens
tgtatgtgagatttaattttcaaagactcctctgatccaacttaagctttatggtaaatcaccttgggacttaaatgatgagaagcactgctatctcacagtgagaaattcagaagggctgggagttccaagtcagagctctgatctggaaagttccatcaaagcgtcactccaggcttagcggttgccacccaccactccgtcagactaaacagcctcagagccctgtgacctgctaatgtattcacaaactaactcagctaattaatcccagctcattcatcctctcaaactatgcaagtcttccagctggccctccggcttgctgccctggctaatggagtgttacgtggactctctgtaggttgcaccttactcgcagccaagcaaaggcactcatta

SEQ ID NO: 859 - DNA, 402 bp, Homo sapiens
ctcaccatcactcctctctcactgatgctcaagtgggctatcacctcgcctttcctgagccttccttcgctatcctaaaacagcgcctcccgaaatcaccactaaagaacttattcatgtaaccaaacaccagcggttcccctaaaaacctatggaaataaaaattaaaaataaaaacagtgcctcccatgacccatgtcctctccagtcccataactctgctctatttccattcacagctccatccccacctttatgtcttttgttcactgctttatccccagtgcctagaagagtgcttggcacctagtagacactcagtaagtatttgtcgaatgagttaataaggttgtgaaaagaacgttagattactggaaggattcatctgagtttaattctgct

SEQ ID NO: 860 - DNA, 402 bp, Homo sapiens
attcatgtaaccaaacaccagcggttcccctaaaaacctatggaaataaaaattaaaaataaaaacagtgcctcccatgacccatgtctctccagtcccataactctgctctatttccattcacagctccatccccacctttatgtcttttgttcactgctttatccccagtgcctagaagagtgcttggcacctagtagagcactcagtaagtatttgtcgaatgagttaataaggttgtgaaaagaacgttagattactggaaggattcatctgagtttaattctgctatgctgggaatccagtgtgcggccttggatgaagccagttccctccctgggccccagtagccacatctgtacatttagagggcaggagaaaagccacacgctctgtgactta

SEQ ID NO: 861 - DNA, 402 bp, Homo sapiens
caaacaccagcggttcccctaaaaacctatggaaataaaaattaaaaataaaaacagtgcctcccatgacccatgtctctccagtcccataactctgctctatttccattcacagctccatccccacctttatgtcttttgttcactgctttatccccagtgcctagaagagtgcttggcacctagtagacactcagtaacgtatttgtcgaatgagttaataaggttgtgaaaagaacgttagattactggaaggattcatctgagtttaattctgctatgctgggaatccagtgtgcggccttggatgaagccagttccctccctgggccccagtagccacatctgtacatttagagggcaggagaaaagccacacgctctgtgacttatacaacttgtt

SEQ ID NO: 862 - DNA, 402 bp, Homo sapiens
cacagctccatccccacctttatgtcttttgttcactgctttatccccagtgcctagaagagtgcttggcacctagtagacactcagtaagtatttgtcgaatgagttaataaggttgtgaaaagaacgttagattactggaaggattcatctgagtttaattctgctatgctgggaatccagtgtgcggccttggatgaaggccagttccctccctgggccccagtagccacatctgtacatttagagggcaggagaaaagccacacgctctgtgacttatacaacttgttgcccagagtggaggctgctttgatgctcagaaaaaagaaacaaacatggaaatgctaaatgggtggcagagagcttgagggaggaaggagatggggagggtactcttgaa

SEQ ID NO: 863 - DNA, 402 bp, Homo sapiens
ggatgaagccagttccctccctgggccccagtagccacatctgtacatttagagggcaggagaaaagccacacgctctgtgacttatacaacttgttgcccagagtggaggctgctttgatgctcagaaaaaagaaacaaacatggaaatgctaaatgggtggcagagagcttgagggaggaaggagatggggagggtacctcttgaaactgtttggtgtcttccctcctgccccctcagtaccaattgtcaagtacagaaagtgaaggagacttgtattagtggaatttggtccctgacttgttatagagacacaattacaaagacacaagagtgggcccagcagagacccttagggtggtcccttgaggttccaaagcatctgcccatcaagcagatgat

SEQ ID NO: 864 - DNA, 402 bp, Homo sapiens
tcttcggtaaaatgagaataatattatgcatacctcacaggggttaagcaatgtgaaagtactctgtaaagtataaggctgaaatgtactgggctcagaacctataggtctgttccattctcgacacacgtgatattagcagcacggtacatttaaggacacggcttgattctttaatcacagggcatcctgtcttctccagcattgcttgggaccccaaaaaatgaagttctgtcatgtctctagaccaccaccaaacacataaaagtcacttaggaaaacatggtaggaggcagaggaaaggaattgttgaacagggattgcagattcaggtatataaacgagtgatgatgactctaacaacagctcttggtcttagtgttggaaatgtaatagggagta

SEQ ID NO: 865 - DNA, 402 bp, Homo sapiens
ataatattatgcatacctcacaggggttaagcaatgtgaaagtactctgtaaagtataaggctgaaatgtactgggctcagaacctataggtctgttccattctcgacacacgtgatattagcagcacggtacatttaaggacacggcttgattctttaatcacagggcatcctgtcttctccacattgcttgggaccccacaaaaatgaagttctgtcatgtctctagaccaccaccaaacacataaaagtcacttaggaaaacatggtaggaggcagaggaaaggaattgttgaacagggattgcagattcaggtatataaacgagtgatgatgactctaacaacagctcttggtcttagtgttggaaatgtaatagggagtagtggggactgcggttta

SEQ ID NO: 866 - DNA, 402 bp, Homo sapiens
tattatgcatacctcacaggggttaagcaatgtgaaagtactctgtaaagtataaggctgaaatgtactgggctcagaacctataggtctgttccattctcgacacacgtgatattagcagcacggtacatttaaggacacggcttgattctttaatcacagggcatcctgtcttctccacattgcttgggaccccaaaaagatgaagttctgtcatgtctctagaccaccaccaaacacataaaagtcacttaggaaaacatggtaggaggcagaggaaaggaattgttgaacagggattgcagattcaggtatataaacgagtgatgatgactctaacaacagctcttggtcttagtgttggaaatgtaatagggagtagtggggactgcggtttaattg

SEQ ID NO: 867 - DNA, 402 bp, Homo sapiens
agcaatgtgaaagtactctgtaaagtataaggctgaaatgtactgggctcagaacctataggtctgttccattctcgacacacgtgatattagcagcacggtacatttaaggacacggcttgattctttaatcacagggcatcctgtcttctccacattgcttgggaccccaaaaaatgaagttctgtcatgtctctagactcaccaccaaacacataaaagtcacttaggaaaacatggtaggaggcagaggaaaggaattgttgaacagggattgcagattcaggtatataaacgagtgatgatgactctaacaacagctcttggtcttagtgttggaaatgtaatagggagtagtggggactgcggtttaattgttgccgtgtgggaatgtgggcctgg

SEQ ID NO: 868 - DNA, 402 bp, Homo sapiens
agcacggtacatttaaggacacggcttgattctttaatcacagggcatcctgtcttctccacattgcttgggaccccaaaaaatgaagttctgtcatgtctctagaccaccaccaaacacataaaagtcacttaggaaaacatggtaggaggcagaggaaaggaattgttgaacagggattgcagattcaggtatataaactgagtgatgatgactctaacaacagctcttggtcttagtgttggaaatgtaatagggagtagtggggactgcggtttaattgttgccgtgtgggaatgtgggcctggcatggccataatttcagatttctaaaggaaagccaaaagttcatatttttatgtgaaataaatgttgataaagttcacacttaaatgaagtgaa

SEQ ID NO: 869 - DNA, 402 bp, Homo sapiens
gtgggaatgtgggcctggcatggccataatttcagatttctaaaggaaagccaaaagttcatatttttatgtgaaataaatgttgataaagttcacacttaaatgaagtgaaacagaccagggctggtggtttatacctgtaattccagtgctttaagaggccgaggcaggaggatcacttgaggccaggagttcaaggcctagtctgggcaacacagtgagaccccatctctaccaaaaaaaaattaatttaaaaaataaaagaagtgaaacaacagtaccctgtgggctgccagattgtgatttctgaactaaactgtcagattacaaagttacccgctaaattagccaaatactttccagatattccctgggccactgtctcgggactcttaatatatt

SEQ ID NO: 870 - DNA, 402 bp, Homo sapiens
ctgtaattccagtgctttaagaggccgaggcaggaggatcacttgaggccaggagttcaaggctagtctgggcaacacagtgagaccccatctctaccaaaaaaaaattaatttaaaaaataaaagaagtgaaacaacagtaccctgtgggctgccagattgtgatttctgaactaaactgtcagattacaaagttacccagctaaattagccaaatactttccagatattccctgggccactgtctcgggactcttaatatattttccaattagttccttttagtgctacatacacacttttagcaaataatgagcacttactagtcactttctatgtgcaaagcagatattagacatcacagagggagtgagataccgaaaacaaaaataaaacaaaaat

SEQ ID NO: 871 - DNA, 402 bp, Homo sapiens
tgtgtctgccaaggcttcatttattaagtgcacagttaagaggcttcagagctgaatcctggagaggatagcaccttgccatcttctccctgcctctgggcaggcggatatacattctcagatgaactgactgcactccttgcatctggaagttcatgttccagtggagggtaatgcccagttgacttcttcagctaagaagatggcccgtaacagtgctcatggactgtccggattcttaagggcagaggagccagagccaggaaatgtccttagtggccatcagttgttatgtctgttcactaatgttccaggccctatgcttctggtgtccaccacccacagaccccctgttctgttccacggactgagatgatcaacagtctttcatccagagggttg

SEQ ID NO: 872 - DNA, 402 bp, Homo sapiens
ctgaatcctggagaggatagcaccttgccatcttctccctgcctctgggcaggcggatatacattctcagatgaactgactgcactccttgcatctggaagttcatgttccagtggagggtaatgcccagttgacttcttcagctaagagatggcccgtaacagtgctcatggactgtccggattcttaagggcagaggacgccagagccaggaaatgtccttagtggccatcagttgttatgtctgttcactaatgttccaggccctatgcttctggtgtccaccacccacagaccccctgttctgttccacggactgagatgatcaacagtctttcatccagagggttgtgtttgctggtggccattacctttaacataaaacgatcatatttactttat

SEQ ID NO: 873 - DNA, 402 bp, Homo sapiens
ctattcatgtccaacctcaactgacaattgagttgtgtctctgacaataaatagcagaaaaaggaaatcttcctatactgaagagaaacacaattaattaactagatccatcaggaaaggtacaatcatgattgagacagtgtttaacagatgtgactattggattctgttgttgagaatgacccttaaaatcacagtcaagaatatacgacaagatggaaataacatttttgagcacctactatgcatgtagagcatcttacataccttatctcacttagatttacagctgcaaggtgggtatgattctagcttgaattagtctaataaccatatacctcctaggggcagtgagatgattagatcaattctaaaactattaccatgctctctgagctcacc

SEQ ID NO: 874 - DNA, 402 bp, Homo sapiens
caattaattaactagatccatcaggaaaggtacaatcatgattgagacagtgtttaacagatgtgactattggattctgttgttgagaatgacccttaaaatcacagtcaaaatatacgacaagatggaaataacatttttgagcacctactatgcatgtagagcatcttacataccttatctcacttagatttacagctagcaaggtgggtatgattctagcttgaattagtctaataaccatatacctcctaggggcagtgagatgattagatcaattctaaaactattaccatgctctctgagctcaccaagacaggcagttaatacaaggatacattaataccgaatccagcaaaagctcacatggccagcttccattatgttcctatttgtgattat

SEQ ID NO: 875 - DNA, 402 bp, Homo sapiens
cagtcaaaatatacgacaagatggaaataacatttttgagcacctactatgcatgtagagcatcttacataccttatctcacttagatttacagctgcaaggtgggtatgattctagcttgaattagtctaataaccatatacctcctaggggcagtgagatgattagatcaattctaaaactattaccatgctctctgaagctcaccaagacaggcagttaatacaaggatacattaataccgaatccagcaaaagctcacatggccagcttccattatgttcctatttgtgattattctgtatcaagcacagaaatgtatgttcacacgaacaacaaagaaggggtttattagtgtggattacagggcctaagcctaccctctgaaactggttttggagt

SEQ ID NO: 876 - DNA, 402 bp, Homo sapiens
tggaaataacatttttgagcacctactatgcatgtagagcatcttacataccttatctcacttagatttacagctgcaaggtgggtatgattctagcttgaattagtctaataaccatatacctcctaggggcagtgagatgattagatcaattctaaaactattaccatgctctctgagctcaccaagacaggcagttaagtacaaggatacattaataccgaatccagcaaaagctcacatggccagcttccattatgttcctatttgtgattattctgtatcaagcacagaaatgtatgttcacacgaacaacaaagaaggggtttattagtgtggattacagggcctaagcctaccctctgaaactggttttggagtctttagcacgcttgtttggga

SEQ ID NO: 877 - DNA, 402 bp, Homo sapiens
cttgaattagtctaataaccatatacctcctaggggcagtgagatgattagatcaattctaaaactattaccatgctctctgagctcaccaagacaggcagttaatacaaggatacattaataccgaatccagcaaaagctcacatggccagcttccattatgttcctatttgtgattattctgtatcaagcacagaaatagtatgttcacacgaacaacaaagaaggggtttattagtgtggattacagggcctaagcctaccctctgaaactggttttggagtctttagcacgcttgtttgggacagttaaacatgtgccagctattctaaaacagtagcagtaatgtgatagagctgggtcataccgtgcttcccaaagtatgatcacttcatttcaac

SEQ ID NO: 878 - DNA, 402 bp, Homo sapiens
cctaggggcagtgagatgattagatcaattctaaaactattaccatgctctctgagctcaccaagacaggcagttaatacaaggatacattaataccgaatccagcaaaagctcacatggccagcttccattatgttcctatttgtgattattctgtatcaagcacagaaatgtatgttcacacgaacaacaaagaaggggttttattagtgtggattacagggcctaagcctaccctctgaaactggttttggagtctttagcacgcttgtttgggacagttaaacatgtgccagctattctaaaacagtagcagtaatgtgatagagctgggtcataccgtgcttcccaaagtatgatcacttcatttcaacaacttcacactaacagcctgaactgggc

SEQ ID NO: 879 - DNA, 402 bp, Homo sapiens
tttattagtgtggattacagggcctaagcctaccctctgaaactggttttggagtctttagcacgcttgtttgggacagttaaacatgtgccagctattctaaaacagtagcagtaatgtgatagagctgggtcataccgtgcttcccaaagtatgatcacttcatttcaacaacttcacactaacagcctgaactgggcctgtgaagggaatatttagaccaaggaaactggaaaactgtatcaatcaggcttttccaccctccccaagagccagttgtcagatatctaccagcctaccaacgctagctctctaatcagaaaccatcacttagcaagttcccaaattatctgcagagcaatgaactcctcttcttcagaaagcaggctgaaagatacactg

SEQ ID NO: 880 - DNA, 402 bp, Homo sapiens
gaactacctaagtaaatcatcaaaaaaaaaaaaaaaaaaaatcatcccagggcactttttccagacaaaaaggtccacttaaaacatcctctagagatctgtgcctgaagctgagctgctgcaatgaaactgacatttctgccttgcagcctggccatgggcttagctggactaaaatgctgctgcagtggtgagggcacagtgagagtccctaatgtacatggccttgctccttgtcctgacacatcttttagggctgctgctttctctagtgctggaatctagataattcctttcccagccgtttgtttcttcaatcttggaaaatatctggatgaatgtaacactgtcacacacaaacagaattatgacttacgtcacattctatgtcgtgattttgtg

SEQ ID NO: 881 - DNA, 402 bp, Homo sapiens
ctgcaatgaaactgacatttctgccttgcagcctggccatgggcttagctggactaaaatgctgctgcagtggtgagggcacgtgagagtccctaatgtacatggccttgctccttgtcctgacacatcttttagggctgctgctttctctagtgctggaatctagataattcctttcccagccgtttgtttcttcaatcgttggaaaatatctggatgaatgtaacactgtcacacacaaacagaattatgacttacgtcacattctatgtcgtgattttgtggacttttaataattgcattacatttgtgaccattaatttccaccatcgccctgctcctgagaatctgtaagggacatttgacactcctctccccacccacctcaacatttgtgctgac

SEQ ID NO: 882 - DNA, 402 bp, Homo sapiens
atgggcttagctggactaaaatgctgctgcagtggtgagggcacgtgagagtccctaatgtacatggccttgctccttgtcctgacacatcttttagggctgctgctttctctagtgctggaatctagataattcctttcccagccgtttgtttcttcaatcttggaaaatatctggatgaatgtaacactgtcacacacagaacagaattatgacttacgtcacattctatgtcgtgattttgtggacttttaataattgcattacatttgtgaccattaatttccaccatcgccctgctcctgagaatctgtaagggacatttgacactcctctccccacccacctcaacatttgtgctgacctgaaggtcacattaaaaacatacccatttggagagaa

SEQ ID NO: 883 - DNA, 402 bp, Homo sapiens
tgagaaatgtataaattcaatttcacttaaaaggagcaggaggggtttcaagattaagagaacaaatgcttgaagcaaaacatgatttgagttttattgaaccgagaagactgaaaaaaatacgtggaacactcagaaaatctttatcaaggctcagctgagcactcctggggctcattgttaagtttataaaactcagaagctgatgagttgtgtgcactgtgtgggtctgagtgggcttatgactcccctccaagcctggctgtaagaatctaagacttaaagctgaaggaccaaatgggactttccgtcccatcccctctctgctccatgcaagcaccaacgtggatttttgcccctaattatattagggaacgctgtcaatcaaaaagatgatgttaa

SEQ ID NO: 884 - DNA, 402 bp, Homo sapiens
agactgaaaaaaatacgtggaacactcagaaaatctttatcaaggctcagctgagcactcctggggctcattgttaagtttataaaactcagagctgatgagttgtgtgcactgtgtgggtctgagtgggcttatgactcccctccaagcctggctgtaagaatctaagacttaaagctgaaggaccaaatgggactttcctgtcccatcccctctctgctccatgcaagcaccaacgtggatttttgcccctaattatattagggaacgctgtcaatcaaaaagatgatgttaaactcatccagaacaaaccaaaccatgtttaaggggaagaaaagattacatcttcaaatgccagcatgccatcattaatacaatgtctaatgtagtcaatatagttca

SEQ ID NO: 885 - DNA, 402 bp, Homo sapiens
tttatcaaggctcagctgagcactcctggggctcattgttaagtttataaaactcagagctgatgagttgtgtgcactgtgtgggtctgagtgggcttatgactcccctccaagcctggctgtaagaatctaagacttaaagctgaaggaccaaatgggactttccgtcccatcccctctctgctccatgcaagcaccaactgtggatttttgcccctaattatattagggaacgctgtcaatcaaaaagatgatgttaaactcatccagaacaaaccaaaccatgtttaaggggaagaaaagattacatcttcaaatgccagcatgccatcattaatacaatgtctaatgtagtcaatatagttcaggcaacattgaaaatgaaccactgcaaatactagg

SEQ ID NO: 886 - DNA, 402 bp, Homo sapiens
cattgttaagtttataaaactcagagctgatgagttgtgtgcactgtgtgggtctgagtgggcttatgactcccctccaagcctggctgtaagaatctaagacttaaagctgaaggaccaaatgggactttccgtcccatcccctctctgctccatgcaagcaccaacgtggatttttgcccctaattatattagggaacagctgtcaatcaaaaagatgatgttaaactcatccagaacaaaccaaaccatgtttaaggggaagaaaagattacatcttcaaatgccagcatgccatcattaatacaatgtctaatgtagtcaatatagttcaggcaacattgaaaatgaaccactgcaaatactaggaatacaatttcaagaggaagcacaacattctgt

SEQ ID NO: 887 - DNA, 402 bp, Homo sapiens
tgcagtgagtggagatcacaccagtgcacttcatcctggatgacatagcgagaccctgtctcaaaaaaagaaaaaaagaaattgaactatattgcttgatttccaaatgtttttgaggattttctaattttcttttggctattgatatgttgcttaattcaactctggacaaaaacagtctataacttcaattctttaaacgttttttgagattgactttatggcccaggaaatggtcacttttggtaaatattctatgtgcacttgaaaaaatttatagtattttatgattgctgagtacagagctccatacgtctcaatgagacaagtttcttaattatgttgctcagatcttctatacccctattgatttttttgtctgtttatcagctgctgaaagag

SEQ ID NO: 888 - DNA, 402 bp, Homo sapiens
ttgaactatattgcttgatttccaaatgtttttgaggattttctaattttcttttggctattgatatgttgcttaattcaactctggacaaaaacagtctataacttcaattctttaaagttttttgagattgactttatggcccaggaaatggtcacttttggtaaatattctatgtgcacttgaaaaaatttatagtacttttatgattgctgagtacagagctccatacgtctcaatgagacaagtttcttaattatgttgctcagatcttctatacccctattgatttttttgtctgtttatcagctgctgaaagaggtatttttaaattactccaattatgactgtgaatttattatttttccttttaattctatcagtctttgctttatttgtatt

SEQ ID NO: 889 - DNA, 402 bp, Homo sapiens
cttttggctattgatatgttgcttaattcaactctggacaaaaacagtctataacttcaattctttaaagttttttgagattgactttatggcccaggaaatggtcacttttggtaaatattctatgtgcacttgaaaaaatttatagtattttatgattgctgagtacagagctccatacgtctcaatgagacaagtttcgttaattatgttgctcagatcttctatacccctattgatttttttgtctgtttatcagctgctgaaagaggtatttttaaattactccaattatgactgtgaatttattatttttccttttaattctatcagtctttgctttatttgtattttgaagctacattattagtacatattaatttagaattgttttatcttcct

SEQ ID NO: 890 - DNA, 402 bp, Homo sapiens
tatttttccttttaattctatcagtctttgctttatttgtattttgaagctacattattagtacatattaatttagaattgttttatcttcctagcagatgggcccttttacataagaattctctatctctagcaaagttacttgccttaacatctactttagctgatgtaaacatagctgtgccagtgtttcttgatttagtgtttgcatggtatatccttttccatcattttacttttattttctgtgcccttatgcttacaagcagcatttaatcagggtttggtttatatctgatgatttctatcttgtattgtagattttctattttttaatttttcagtggttttactctgatgttcttataagtggttttctttgtgtttatcttgcttggggtt

SEQ ID NO: 891 - DNA, 402 bp, Homo sapiens
cagtggttttactctgatgttcttataagtggttttctttgtgtttatcttgcttggggtttgtagtgctccttcactctgtgacttgatatatttcactcatttttttaaaatgttcatttattagctctttaaatatcgcttcattatcattatttatctctttcttttctgagactccaattatacatatgttcaaactttttcatcgcgtctcatatgtctcttatgcaagcttatctgtgattccattctttttttttctttttttgagatggaatctcactttgttgcccagcctggagtgcagtagcacaatctcggctcactgcagcctccaccccttgggctcaagtgattctcctgcctcagcctcccaagcagctgggactacaggcgcgc

SEQ ID NO: 892 - DNA, 402 bp, Homo sapiens
actctgatgttcttataagtggttttctttgtgtttatcttgcttggggtttgtagtgctccttcactctgtgacttgatatatttcactcatttttttaaaatgttcatttattagctctttaaatatcgcttcattatcattatttatctctttcttttctgagactccaattatacatatgttcaaacttttcatcgctgtctcatatgtctcttatgcaagcttatctgtgattccattctttttttttctttttttgagatggaatctcactttgttgcccagcctggagtgcagtagcacaatctcggctcactgcagcctccaccccttgggctcaagtgattctcctgcctcagcctcccaagcagctgggactacaggcgcgcaccaccatgc

SEQ ID NO: 893 - DNA, 402 bp, Homo sapiens
tattagctctttaaatatcgcttcattatcattatttatctctttcttttctgagactccaattatacatatgttcaaacttttcatcgcgtctcatatgtctcttatgcaagcttatctgtgattccattctttttttttctttttttgagatggaatctcactttgttgcccagcctggagtgcagtagcacaatctcaggctcactgcagcctccaccccttgggctcaagtgattctcctgcctcagcctcccaagcagctgggactacaggcgcgcaccaccatgcccagctaattttcatatttttagtagagacgggatttccccatgttggccaggttggtctcgaactcctgacctcaagtgatcccccgcctaggcctcccaaagtgctggg

SEQ ID NO: 894 - DNA, 402 bp, Homo sapiens
attagctctttaaatatcgcttcattatcattatttatctctttcttttctgagactccaattatacatatgttcaaacttttcatcgcgtctcatatgtctcttatgcaagcttatctgtgattccattctttttttttctttttttgagatggaatctcactttgttgcccagcctggagtgcagtagcacaatctcgagctcactgcagcctccaccccttgggctcaagtgattctcctgcctcagcctcccaagcagctgggactacaggcgcgcaccaccatgcccagctaattttcatatttttagtagagacgggatttccccatgttggccaggttggtctcgaactcctgacctcaagtgatcccccgcctaggcctcccaaagtgctggga

SEQ ID NO: 895 - DNA, 402 bp, Homo sapiens
acttttcatcgcgtctcatatgtctcttatgcaagcttatctgtgattccattctttttttttctttttttgagatggaatctcactttgttgcccagcctggagtgcagtagcacaatctcggctcactgcagcctccaccccttgggctcaagtgattctcctgcctcagcctcccaagcagctgggactacaggcgcagcaccaccatgcccagctaattttcatatttttagtagagacgggatttccccatgttggccaggttggtctcgaactcctgacctcaagtgatcccccgcctaggcctcccaaagtgctgggattacaggcatgagccactgtgcctggactgtgatttcattcttttctctcttgtgcatctgtctgtgcatttttcta

SEQ ID NO: 896 - DNA, 402 bp, Homo sapiens
tcaagtgattctcctgcctcagcctcccaagcagctgggactacaggcgcgcaccaccatgcccagctaattttcatatttttagtagagacgggatttccccatgttggccaggttggtctcgaactcctgacctcaagtgatcccccgcctaggcctcccaaagtgctgggattacaggcatgagccactgtgcctggacctgtgatttcattcttttctctcttgtgcatctgtctgtgcatttttctattgacttatctaccaagtcacttattatctcttaatctgtgtcaaacccacttttaaattggtctgtttaattgttaatttggataacatatttttcaattctacaatttttgattgactttttgtatatattctggttctctggtggaa

SEQ ID NO: 897 - DNA, 402 bp, Homo sapiens
ccatgttggccaggttggtctcgaactcctgacctcaagtgatcccccgcctaggcctcccaaagtgctgggattacaggcatgagccactgtgcctggactgtgatttcattcttttctctcttgtgcatctgtctgtgcatttttctattgacttatctaccaagtcacttattatctcttaatctgtgtcaaacccaacttttaaattggtctgtttaattgttaatttggataacatatttttcaattctacaatttttgattgactttttgtatatattctggttctctggtggaattatctagctttttgtatattttcttgaacaaatgttcaccattattttaaagcccagatatgattaatccaattatctagatcagctgtggatctattac

SEQ ID NO: 898 - DNA, 402 bp, Homo sapiens
aatccaattatctagatcagctgtggatctattactgtattctattttttctcttagtcttgtctcttaatatgcctgacagatttttactgaagggtgcacattggaataaaaaatgtgttacctatctggttgagtcttcagcttcagaaaggtaatagagcaaaggcagataaatccaaacagggactgagctgtttctcatgcaggctgccttggtagctctccaaagccttcaaaaatgatgagatttttttttaaatcctttttatccagttgttctcaagggattccacccctgcataggagagctcaccattcctgggatcttcagcttctatgcctttgcatatgctcttcccttgttccctcattcttcaacactcaactgaattatcacct

SEQ ID NO: 899 - DNA, 402 bp, Homo sapiens
tcaacactcaactgaattatcacctcccttgaagccttctctgacatcccttctagtcccatgccacccaggaggcactaagagcttcctcccctcagctcccagttcttaaacatgtcaacactgttttgaaatgatttgccaatgaaaaattctagaccagcaaccaacaacatccttcccaaaggtgtgttatatataggtacatgctgtatgtgctaaacaccaaattcattgataacagctaagaaccaggaaacaaaccatcgttaattatggcatctcttgaaaaatctaaagatctggactcactgggcttaaatgactgcatgataacaactggttgagtaacaactgtttccctttcatggagcagttactctccagttctcagttcctacc

SEQ ID NO: 900 - DNA, 402 bp, Homo sapiens
actgaattatcacctcccttgaagccttctctgacatcccttctagtcccatgccacccaggaggcactaagagcttcctcccctcagctcccagttcttaaacatgtcaacactgttttgaaatgatttgccaatgaaaaattctagaccagcaaccaacaacatccttcccaaaggtgtgttatatatggtacatgctcgtatgtgctaaacaccaaattcattgataacagctaagaaccaggaaacaaaccatcgttaattatggcatctcttgaaaaatctaaagatctggactcactgggcttaaatgactgcatgataacaactggttgagtaacaactgtttccctttcatggagcagttactctccagttctcagttcctaccactctctata

SEQ ID NO: 901 - DNA, 402 bp, Homo sapiens
actattctgcgtaatgctgtaacagtggatacatgacgtcatgcatttgtcaaaacccacagaactgtacaacacaaagcatgaactctaatgtaaactatgggctttagttaatatctacatatcaataccggttcatcaactggaacagatataccacaccagtgcaagatgtgaataataggagaaactgtgagggcaggaatatacacaaactctctatattttctgtgcaatttttctgtaacctgaaacagctctaaaaataaagtatatttataaaaaataaataaatacaaatgccacctcaccagaaggatcaaaggggcaactaaatccagcaaagtaagtgtctcacgtggaatacaggtcaggaaatgagtgaaaacactccaatggatg

SEQ ID NO: 902 - DNA, 402 bp, Homo sapiens
gggctttagttaatatctacatatcaataccggttcatcaactggaacagatataccacaccagtgcaagatgtgaataataggagaaactgtgagggcggaatatacacaaactctctatattttctgtgcaatttttctgtaacctgaaacagctctaaaaataaagtatatttataaaaaataaataaatacaaatgctcacctcaccagaaggatcaaaggggcaactaaatccagcaaagtaagtgtctcacgtggaatacaggtcaggaaatgagtgaaaacactccaatggatgcccacctatacgatcactttgaagagcagcaggaaaataagcctctgctgtctgggttgcagattgggggacaggagagaaactaatacacactcaagatg

SEQ ID NO: 903 - DNA, 402 bp, Homo sapiens
cacaccagtgcaagatgtgaataataggagaaactgtgagggcggaatatacacaaactctctatattttctgtgcaatttttctgtaacctgaaacagctctaaaaataaagtatatttataaaaaataaataaatacaaatgccacctcaccagaaggatcaaaggggcaactaaatccagcaaagtaagtgtctcacagtggaatacaggtcaggaaatgagtgaaaacactccaatggatgcccacctatacgatcactttgaagagcagcaggaaaataagcctctgctgtctgggttgcagattgggggacaggagagaaactaatacacactcaagatggtggctgagctgccttacacactcgtggccaggggtgcttgcaagacaggcggaag

SEQ ID NO: 904 - DNA, 402 bp, Homo sapiens
tgttctctttttctccatggtcttcacctcctaatctaatcaacatatactgaggcagtttttcttattactttatctctttttatttcatatttatttcctataatcagcttcaagtcctttgtgcaacaaagtggcatgtgtttaaataaacagtgaggagtaggctatgtggtttgtaggtgggagggtaagtaggtagtagatcaaaaaccaaaaactcaatgcctattgcacagggcaagcagcataaatgaattctgtgagccaggggtgaacaacaggacatcctagaggctgtggctgcccagaggggacagccggtgttcagctctagcaggctgctgaagtgtctgaatttgagaccaaaattgtcagataatcccattttccaagacaaat

SEQ ID NO: 905 - DNA, 402 bp, Homo sapiens
tgagaccaaaattgtcagataatcccattttccaagacaaatcagacatccagatttgtacatggatctctcatctttaaacatggacaactaattccaaaataattaagatacattttacaggtcaaacaagacctatctttgggccacactcaagccgaggatcactattttgtaacctcaaagctagacggatggccagggtgcagtggctcatgtctgtaatctcagcactttggaaggccaaggtgggcagatcacctgaggtcagaaacttgagaccagcctggctaacgtggtgaaaacccgtttctactaaaaataaaaaaaaattagccgggcatggtggggcacacctgtaatcccagctactcaggaggctgaggcaggagaattgcttga

SEQ ID NO: 906 - DNA, 402 bp, Homo sapiens
acactcaagccgaggatcactattttgtaacctcaaagctagacggatggccgggtgcagtggctcatgtctgtaatctcagcactttggaaggccaaggtgggcagatcacctgaggtcagaaacttgagaccagcctggctaacgtggtgaaaacccgtttctactaaaaataaaaaaaaattagccgggcatggtggcggcacacctgtaatcccagctactcaggaggctgaggcaggagaattgcttgaacccgggaggtggaggttgcagtgagccgagatcacaccattgcactccagcttgggcaacaagagcaaaaatccatcttaaaaaaaaaaaaaagctagatgggtaagtataaagtccaaatcagagacaccatgagggaggcactat

SEQ ID NO: 907 - DNA, 402 bp, Homo sapiens
atgctctgcataatgacgtttccatcagcaacacaacatacacaattgtggtcccataagattataacagagctaaaaaattcctattgcccagtgacttcttgaggttcctgaccctgtgtgggctcaggctaacgtgtgtggttgtgtcttcatttgtaattttaaaaaaagggttttaaaagaaaagaaatgaaaatataaaaatttttaaatagagaaaaagcttataaaataagaaaataaagaaaaatatttttgtacagctaggcagtgtgaattttaagctaagcgttatcacaaaagagtccaaaagtttgaaaaaaaaccaaatagtttgtaaaataaagttagagtaagctaaggttaatttcttattgaaaaaaaaatttattaatttag

SEQ ID NO: 908 - DNA, 402 bp, Homo sapiens
cgtcacctgtaaagtttcctgtgaatgtgtctacagcggccagcaccacaaggcatacaaagaaagggaagggagagctgatgtgagagcggcagcgtgggcactcctgtgaggttgccacagctgtagacaagttaaatcagtgcagttcaatcaaaagtcatgacccatgagcgtcacaaccagcacgagtctacaaacggaatacattaaaactaagaccagagcacagctcacattagtgagggatgggatcatttcatggagtttttgtttcaaaatatttcattaacatttcacttatatacatgtgtgtatactgggttgtgatttaaattacaattcttactataaaatacagcaaaagaaagaagaaacaaagagagggccactggtttacct

SEQ ID NO: 909 - DNA, 402 bp, Homo sapiens
actcctgtgaggttgccacagctgtagacaagttaaatcagtgcagttcaatcaaaagtcatgacccatgagcgtcacaaccagcacgagtctacaaaggaatacattaaaactaagaccagagcacagctcacattagtgagggatgggatcatttcatggagtttttgtttcaaaatatttcattaacatttcacttactatacatgtgtgtatactgggttgtgatttaaattacaattcttactataaaatacagcaaaagaaagaagaaacaaagagagggccactggtttacctaacatccacaggcaggctacttcccagcatcttgagccccaaagaagtaaatttccttccacaaccgatgttaccacagcctgacacttagccaatgatgaa

SEQ ID NO: 910 - DNA, 402 bp, Homo sapiens
caagttaaatcagtgcagttcaatcaaaagtcatgacccatgagcgtcacaaccagcacgagtctacaaaggaatacattaaaactaagaccagagcacagctcacattagtgagggatgggatcatttcatggagtttttgtttcaaaatatttcattaacatttcacttatatacatgtgtgtatactgggttgtgatattaaattacaattcttactataaaatacagcaaaagaaagaagaaacaaagagagggccactggtttacctaacatccacaggcaggctacttcccagcatcttgagccccaaagaagtaaatttccttccacaaccgatgttaccacagcctgacacttagccaatgatgaaaacgaaaaacaaaacaaaagcttggcag

SEQ ID NO: 911 - DNA, 402 bp, Homo sapiens
acgagtctacaaaggaatacattaaaactaagaccagagcacagctcacattagtgagggatgggatcatttcatggagtttttgtttcaaaatatttcattaacatttcacttatatacatgtgtgtatactgggttgtgatttaaattacaattcttactataaaatacagcaaaagaaagaagaaacaaagagagggctcactggtttacctaacatccacaggcaggctacttcccagcatcttgagccccaaagaagtaaatttccttccacaaccgatgttaccacagcctgacacttagccaatgatgaaaacgaaaaacaaaacaaaagcttggcagtcagtatccaaatatgcagatactacagaatctgtttgatgtagaagttgatcctgc

SEQ ID NO: 912 - DNA, 402 bp, Homo sapiens
ttgtgatttaaattacaattcttactataaaatacagcaaaagaaagaagaaacaaagagagggccactggtttacctaacatccacaggcaggctacttcccagcatcttgagccccaaagaagtaaatttccttccacaaccgatgttaccacagcctgacacttagccaatgatgaaaacgaaaaacaaaacaaaagctttggcagtcagtatccaaatatgcagatactacagaatctgtttgatgtagaagttgatcctgctacccagacagcaaacaactcatttattaataaagtccagttcctccttaatgaagtgggtttaatagttgatatctcaataattacttagtgcattttttatgaaggtgatgggaaacaagtgctgtttcttgag

SEQ ID NO: 913 - DNA, 402 bp, Homo sapiens
tggtttacctaacatccacaggcaggctacttcccagcatcttgagccccaaagaagtaaatttccttccacaaccgatgttaccacagcctgacacttagccaatgatgaaaacgaaaaacaaaacaaaagcttggcagtcagtatccaaatatgcagatactacagaatctgtttgatgtagaagttgatcctgctacctcagacagcaaacaactcatttattaataaagtccagttcctccttaatgaagtgggtttaatagttgatatctcaataattacttagtgcattttttatgaaggtgatgggaaacaagtgctgtttcttgagtcggaaagagtctctcaagctcccacaaagaaatttcccgagcttgtgaggaattcagtcacaggaag

SEQ ID NO: 914 - DNA, 402 bp, Homo sapiens
acctaacatccacaggcaggctacttcccagcatcttgagccccaaagaagtaaatttccttccacaaccgatgttaccacagcctgacacttagccaatgatgaaaacgaaaaacaaaacaaaagcttggcagtcagtatccaaatatgcagatactacagaatctgtttgatgtagaagttgatcctgctacccagacatgcaaacaactcatttattaataaagtccagttcctccttaatgaagtgggtttaatagttgatatctcaataattacttagtgcattttttatgaaggtgatgggaaacaagtgctgtttcttgagtcggaaagagtctctcaagctcccacaaagaaatttcccgagcttgtgaggaattcagtcacaggaagatcaag

SEQ ID NO: 915 - DNA, 402 bp, Homo sapiens
gaatttttctccttttctttctttctttttgagaataagccctttcatttacgtagaaatgcttcagcgtttagataattgctacttatcttgttagctacaaacacaaccataattaaaggctctgtaagaattatgaattctggggaaattggccacttgtctctgtggcgtaaacagtatctaatttataacaaatcagtctgccttagtcccagcaggataaggtgatatgtattgcccagcacatgagaaagatggcaattaggaattgttaccaagttacgggagcctcacacgaacatccatcacctttggggatatgtacaagatacaaacttaatttgatggattccttttgtattgggatcaaagtctcaaaagggaaagtgacaatttcag

SEQ ID NO: 916 - DNA, 402 bp, Homo sapiens
cctttcatttacgtagaaatgcttcagcgtttagataattgctacttatcttgttagctacaaacacaaccataattaaaggctctgtaagaattatgaattctggggaaattggccacttgtctctgtggcgtaaacagtatctaatttataacaaatcatctgccttagtcccagcaggataaggtgatatgtattgcctcagcacatgagaaagatggcaattaggaattgttaccaagttacgggagcctcacacgaacatccatcacctttggggatatgtacaagatacaaacttaatttgatggattccttttgtattgggatcaaagtctcaaaagggaaagtgacaatttcagggaaaatctggtgcaatgagaccaacactgatgagagaaa

SEQ ID NO: 917 - DNA, 402 bp, Homo sapiens
caatttcagggaaaatctggtgcaatgagaccaacactgatgagagaaatgcacacaatttaatacacctgctcacctgatgtggcaactcagcctgtgcttgctgtgggttgccacaggatgagacatggtctgtgcatattcccagcagccacccatctcatcactattcttgccagcccagatttacagttgttcaactagatggatttggtaatatctgcatgacaacaacaggcagagaaggttagatggcaattgattcttgattggtgtaagtttatagaacacattctggcagggcccaaaggaaatcactcacctacccctctgtgatggtaaaacgttgaaaattccacggacttggaccttgtgatccttcagtggaagatgggcagattc

SEQ ID NO: 918 - DNA, 402 bp, Homo sapiens
gctgtgggttgccacaggatgagacatggtctgtgcatattcccagcagccacccatctcatcactattcttgccagcccagatttacagttgttcaatagatggatttggtaatatctgcatgacaacaacaggcagagaaggttagatggcaattgattcttgattggtgtaagtttatagaacacattctggcagggctccaaaggaaatcactcacctacccctctgtgatggtaaaacgttgaaaattccacggacttggaccttgtgatccttcagtggaagatgggcagattccttgctttaattgacagacactttctaaataactaatgcaatcttatattacattatagtccataagggagacatacttaaactactacttacaacaactgt

SEQ ID NO: 919 - DNA, 402 bp, Homo sapiens
ggcccaaaggaaatcactcacctacccctctgtgatggtaaaacgttgaaaattccacggacttggaccttgtgatccttcagtggaagatgggcagattccttgctttaattgacagacactttctaaataactaatgcaatcttatattacattatagtccataagggagacatacttaaactactacttacaacaacgtgtttttagagcctttcaaatggtttgtacaaagtagctcccatttaagatattttcctagtatttaaggctatctagtagacattacaaaacaatacgctgtaaatacattcagatttttatcagtaatacttaacatgccgtaatttgaactttctgctaaatcatgctatccattcctagttggccccaatggtgaga

SEQ ID NO: 920 - DNA, 402 bp, Homo sapiens
cccatttaagatattttcctagtatttaaggctatctagtagacattacaaaacaatacgctgtaaatacattcagatttttatcagtaatacttaacatgccgtaatttgaactttctgctaaatcatgctatccattcctagttggccccaatggtgagagtttactgtttctttaaataattttgtttccctttgctcgtctagaggtgtttatcattctgcttacttgcctgtgtctctggaatattcagaaggttccatgggaaacaatttgaatatgcaaagaagttatttttaaagcaaggaaaatgttttcatatggatttattttgagcacttctgcctttgcctccactgggaacatgtttctctccaacgccgaagccccctccctgtgtg

SEQ ID NO: 921 - DNA, 402 bp, Homo sapiens
gtttatcattctgcttacttgcctgtgtctctggaatattcagaaggttccatgggaaacaatttgaatatgcaaagaagttatttttaaagcaaggaaaatgttttcatatggatttattttgagcacttctgcctttgcctccactgggaacatgtttctctccaacgccgaagccccctccctgtgtggtgtttgacagcagaggctgacagggcagggaagtggggttcaagataggaaggccattggcagtgtgaccccagcccacagtcctagatcccaggtcgtgacaccactcttttgacagcccagattgttacctaacaagaatgactcccaagctcaaccattccaatgccatctcctctggttccagataagattgaagatgagctggag

SEQ ID NO: 922 - DNA, 402 bp, Homo sapiens
tttgcctccactgggaacatgtttctctccaacgccgaagccccctccctgtgtggtgtttgacgcagaggctgacagggcagggaagtggggttcaagataggaaggccattggcagtgtgaccccagcccacagtcctagatcccaggtcgtgacaccactcttttgacagcccagattgttacctaacaagaatgacgtcccaagctcaaccattccaatgccatctcctctggttccagataagattgaagatgagctggagatgaccatggtttgccatcggcccgagggactggagcagctcgaggcccagaccaacttcaccaagagggagctgcaggtcctttatcgaggcttcaaaaatgtaagacccgtgcacgctctgaaggcctgggggg

SEQ ID NO: 923 - DNA, 402 bp, Homo sapiens
cccaagctcaaccattccaatgccatctcctctggttccagataagattgaagatgagctggagatgaccatggtttgccatcggcccgagggactggagcagctcgaggcccagaccaacttcaccaagagggagctgcaggtcctttatcgaggcttcaaaaatgtaagacccgtgcacgctctgaaggcctggggggcggttcccacgtgaggctacactctccccaatgccaagggagctcataaggcgtttcccatatgtgaggctgtacaaggaaggccagctctataaagggggcatgagagggagatcacctggctagaaaggaaggctccaggcgaggatggagcaacctcaggagacagtaaacggccaactgcccagaaatttcacagggt

SEQ ID NO: 924 - DNA, 402 bp, Homo sapiens
acctggctagaaaggaaggctccaggcgaggatggagcaacctcaggagacagtaaacggccaactgcccagaaatttcacagggtggcacatcctcaaggaattcaccctggcccagggtcaagccttagcccttaacataatcataccttccaacctggtggtgcccccacaataatgggatttggccctgctgacttactgctaaccaggctcaccgagactgatgtgtaagccgaatgtcggtgtattaatttaccttgggaaatggaactgacagtggaaacagacactcctctcccttcgctgggacccgctctccttggaagccacatggaagccaggttacaatcaaaagtggagtcagaggacgggagttccttgtttagttgttactttaaa

SEQ ID NO: 925 - DNA, 402 bp, Homo sapiens
gcacctggtcaccctccctccaggtgcagtctgtaggtagagctgagctgggtcagttccaaactgaccacagcctcaatgttctccaaactgctgacccacagggattccagcccctcctgggagttatctgacaggtgctgggatgcctcttccttccacactagccttgactgcacatgccaagtgcccagtttcctagccattagggcttctttccttcgatggcagcattagcagtgggcagccgagttggagaaggatcctgtgggaaagttttccaggcaggcactgggctcagagggaacagcatccagaaaagagaagaaatctacactgcttggcatctaccatggactcaataccacctaacataggttcataagatacccttggggaagt

SEQ ID NO: 926 - DNA, 402 bp, Homo sapiens
tgtaggtagagctgagctgggtcagttccaaactgaccacagcctcaatgttctccaaactgctgacccacagggattccagcccctcctgggagttatctgacaggtgctgggatgcctcttccttccacactagccttgactgcacatgccaagtgcccagtttcctaccattagggcttctttccttcgatggcagcatttagcagtgggcagccgagttggagaaggatcctgtgggaaagttttccaggcaggcactgggctcagagggaacagcatccagaaaagagaagaaatctacactgcttggcatctaccatggactcaataccacctaacataggttcataagatacccttggggaagttattgttacccccattttacaggtaaggata

SEQ ID NO: 927 - DNA, 402 bp, Homo sapiens
gccttgactgcacatgccaagtgcccagtttcctaccattagggcttctttccttcgatggcagcattagcagtgggcagccgagttggagaaggatcctgtgggaaagttttccaggcaggcactgggctcagagggaacagcatccagaaaagagaagaaatctacactgcttggcatctaccatggactcaataccactctaacataggttcataagatacccttggggaagttattgttacccccattttacaggtaaggatattgaggatcagagactggcttggccaaagtcacaaagcttagtattggctgagccaggatttaaacccaggtttttctgatcttaaagccccaaatctctccacctcacagtgcccattctctgacaatgtctca

SEQ ID NO: 928 - DNA, 402 bp, Homo sapiens
catggaggtgagtctgaccttgaaatctatcttgcccagctccctctctggtaagcagccttcccttcctccaagtcctctcttccttgccatttgcttccttctcgaggaagagacaaactcagggcaggacacctccctcatcgtgagaggtgggagtctccaaagctttagcaggaaagaactctgaaaatgaacccacccctggaaggggaagaagggctgataatgcaacatcacaacgtctcagaacagctctagaaagcaggtattataatcccagatggagtaactgagtttcggggaagataagcagtgtactcaagattgcacagctggtgagtagcaaaccaggattagattccataagggtctgaaacaggttttgccatgctggcacca

SEQ ID NO: 929 - DNA, 402 bp, Homo sapiens
gcttccttctcgaggaagagacaaactcagggcaggacacctccctcatcgtgagaggtgggagtctccaaagctttagcaggaaagaactctgaaaatgaacccaccctggaaggggaagaagggctgataatgcaacatcacaacgtctcagaacagctctagaaagcaggtattataatcccagatggagtaactgacgtttcggggaagataagcagtgtactcaagattgcacagctggtgagtagcaaaccaggattagattccataagggtctgaaacaggttttgccatgctggcaccaccattgtgcagggcacttttgaatcttttccttaaaatagctgagacaagctggaattttgtaaaagaacttcagtaaataccgaagactataaa

SEQ ID NO: 930 - DNA, 402 bp, Homo sapiens
tttccttaaaatagctgagacaagctggaattttgtaaaagaacttcagtaaataccgaagactataaaaataaactaattgaaaaagaggcaggaaacataaagttgtgcttattaagccagtttacaagtgtgccaggcccacaacagctgctctgttgccctgcccgactcctgtgggaaccagctgtgtccccatgaggcctgggaccacatcggtgactcctcctgtggcctccatgtgtcacatgccactttgcatcctgtcaccaagagctgtctcctgcaagacatcttccctggatcctgacaaaatgcaaatccaagtattccaaacacttcttgggccctgtttctcatgggcctttttggcagcagacagatgccttccttggtgtgtgg

SEQ ID NO: 931 - DNA, 402 bp, Homo sapiens
gccttccttggtgtgtggggcccctacccagatcaggtgggggaggcagttttgtcccatgcaggccccagaattgcagtttgctgagttccactgagccactgtttattgagttctcactgtatgccaggcacagctgtagtttaaaatactttttaaaaaatttcaagagataggtcttgctacatcccattgtagagagggtaggaaagggaagctcagagaggtcgtgcttgatgcccacagtcacatagcttatgtagtacagcggcatccaagttcaggtctctctactctggagtgagtgctcatcccaggcattcatggccgttcagaagaacattgtcatgcagtcactgtgccattcatacaccaacgactccatgcatagacaggcaggag

SEQ ID NO: 932 - DNA, 402 bp, Homo sapiens
gtagatgccagcacgtatgcccattacctcttcaatgccttcgacaccactcagacaggctccgtgaagttcgaggtacgctcatctggggtccactctaggggtcctctggttctgcatcacctccccctctaaatctcaaggcattgggggaaggtctggaccatcaaaagctctcagtcagaccaaagacatgtttactccatttgtaagcatttcctaaagatggggaaaagcagcagcaactttccctggcctgcaggaactcagggactcaggggactaataacaacagtgtatgagcttccgggcacactgcttcccagtggcagcccctgtacttagggctttgtatgtattaattcatttactccaattcccacaataaccctatagggtagg

SEQ ID NO: 933 - DNA, 402 bp, Homo sapiens
tccctggcctgcaggaactcagggactcaggggactaataacaacagtgtatgagcttccgggcacactgcttcccagtggcagcccctgtacttagggctttgtatgtattaattcatttactccaattcccacaataaccctatagggtagggttttattattgattacctttttacagaagaggagagtaaggcaaaagagagatagagtagttttcccaaggtcaaagagcacataaatgataaaggatggatttgaatgtaggcagaatgaccctcaatacagactgttcctacagtccacgtcctcagccactagaccatacggccactgggatgatagacagaccactgcagccatggataaggcaaaaacagggctggctgtgttgatctgtgt

SEQ ID NO: 934 - DNA, 402 bp, Homo sapiens
tattattgattacctttttacagaagaggagagtaaggcaaagagagatagagtagttttcccaaggtcaaagagcacataaatgataaaggatggatttgaatgtaggcagaatgaccctcaatacagactgttcctacagtccacgtcctcagccactagaccatacggccactgggatgatagacagaccactgcagcgcatggataaggcaaaaacagggctggctgtgttgatctgtgtctctcagagctccattcttcctcaagggggcaccttgcaaaaaaaaacaaaaaaatggggcagggtagggaactgaaggcaggagctcttcacagagcatagccacatcctccaggcagacaagaggacgcaggaggcaccattctgtgagagtatca

SEQ ID NO: 935 - DNA, 402 bp, Homo sapiens
accctcaatacagactgttcctacagtccacgtcctcagccactagaccatacggccactgggatgatagacagaccactgcagccatggataaggcaaaaacagggctggctgtgttgatctgtgtctctcagagctccattcttcctcaagggggcaccttgcaaaaaaaaacaaaaaaatggggcagggtagggaacctgaaggcaggagctcttcacagagcatagccacatcctccaggcagacaagaggacgcaggaggcaccattctgtgagagtatcacagtctgacccaaagacacagcttcacactgtctgatggcttgatggttaatgtcactctgccttttccccttctcaggactttgtaaccgctctgtcgattttattgagaggaac

SEQ ID NO: 936 - DNA, 402 bp, Homo sapiens
cctacagtccacgtcctcagccactagaccatacggccactgggatgatagacagaccactgcagccatggataaggcaaaaacagggctggctgtgttgatctgtgtctctcagagctccattcttcctcaagggggcaccttgcaaaaaaaaacaaaaaaatggggcagggtagggaactgaaggcaggagctcttcactagagcatagccacatcctccaggcagacaagaggacgcaggaggcaccattctgtgagagtatcacagtctgacccaaagacacagcttcacactgtctgatggcttgatggttaatgtcactctgccttttccccttctcaggactttgtaaccgctctgtcgattttattgagaggaactgtccacgagaaactaagg

SEQ ID NO: 937 - DNA, 402 bp, Homo sapiens
gccactgggatgatagacagaccactgcagccatggataaggcaaaaacagggctggctgtgttgatctgtgtctctcagagctccattcttcctcaagggggcaccttgcaaaaaaaaacaaaaaaatggggcagggtagggaactgaaggcaggagctcttcacagagcatagccacatcctccaggcagacaagaggatcgcaggaggcaccattctgtgagagtatcacagtctgacccaaagacacagcttcacactgtctgatggcttgatggttaatgtcactctgccttttccccttctcaggactttgtaaccgctctgtcgattttattgagaggaactgtccacgagaaactaaggtggacatttaatttgtatgacatcaacaaggacgg

SEQ ID NO: 938 - DNA, 402 bp, Homo sapiens
ggcaaaaacagggctggctgtgttgatctgtgtctctcagagctccattcttcctcaagggggcaccttgcaaaaaaaaacaaaaaaatggggcagggtagggaactgaaggcaggagctcttcacagagcatagccacatcctccaggcagacaagaggacgcaggaggcaccattctgtgagagtatcacagtctgacctcaaagacacagcttcacactgtctgatggcttgatggttaatgtcactctgccttttccccttctcaggactttgtaaccgctctgtcgattttattgagaggaactgtccacgagaaactaaggtggacatttaatttgtatgacatcaacaaggacggatacataaacaaagaggtaagtgagctggggccaggggtg

SEQ ID NO: 939 - DNA, 402 bp, Homo sapiens
tctgtgtctctcagagctccattcttcctcaagggggcaccttgcaaaaaaaaacaaaaaaatggggcagggtagggaactgaaggcaggagctcttcacagagcatagccacatcctccaggcagacaagaggacgcaggaggcaccattctgtgagagtatcacagtctgacccaaagacacagcttcacactgtctgattggcttgatggttaatgtcactctgccttttccccttctcaggactttgtaaccgctctgtcgattttattgagaggaactgtccacgagaaactaaggtggacatttaatttgtatgacatcaacaaggacggatacataaacaaagaggtaagtgagctggggccaggggtgtgagagggctccagtgaaggtaacta

SEQ ID NO: 940 - DNA, 402 bp, Homo sapiens
tgtttcagtgtgaagagttactcttccctagggaacctgcatttgggaaggttaggagccacaagtcaaagctaaaagttgaaatggtggaattgtaggcagcacctagaatagaaaagaaagatttttaaggaagaggaacctacaattgggtcatattggccttaaactattttgcctattaatacaaccgccaagggaggtaatggaaggtacagctgtctttacagaaattatcacaaataatttctgaatcttcactgctttgcacttttagaacctcagaggacatgtctctagccagtgaaataccctcaggtctatctcaaaactcactttggtatccactgtatcctggtatctcagtggaagctggaaattggcatcctgtaacactccact

SEQ ID NO: 941 - DNA, 402 bp, Homo sapiens
acagaaattatcacaaataatttctgaatcttcactgctttgcacttttagaacctcagaggacatgtctctagccagtgaaataccctcaggtctatctcaaaactcactttggtatccactgtatcctggtatctcagtggaagctggaaattggcatcctgtaacactccacttgctgagctcctgtgtgccaggcactggtgcctggaggtatagatatcagcaccaatcttcacctcaacccggcaagcttctctctgtaagctcagagagtttatccaactttcattcctcattcatttagtcatgtttttaattaacacagatttgaaggcttattaggtgttctaggtgctggaggtaaagaggtgaacaatcagactaggccccacactggag

SEQ ID NO: 942 - DNA, 402 bp, Homo sapiens
accctcaggtctatctcaaaactcactttggtatccactgtatcctggtatctcagtggaagctggaaattggcatcctgtaacactccacttgctgagctcctgtgtgccaggcacggtgcctggaggtatagatatcagcaccaatcttcacctcaacccggcaagcttctctctgtaagctcagagagtttatccaacttttcattcctcattcatttagtcatgtttttaattaacacagatttgaaggcttattaggtgttctaggtgctggaggtaaagaggtgaacaatcagactaggccccacactggagcagcatagagagatggacaataaacaggccaaaaaggaatcagcaggtagaagatattttggcagggaaggttagcaaaggcct

SEQ ID NO: 943 - DNA, 402 bp, Homo sapiens
tgccaggcacggtgcctggaggtatagatatcagcaccaatcttcacctcaacccggcaagcttctctctgtaagctcagagagtttatccaactttcattcctcattcatttagtcatgtttttaattaacacagatttgaaggcttattaggtgttctaggtgctggaggtaaagaggtgaacaatcagactaggcccctacactggagcagcatagagagatggacaataaacaggccaaaaaggaatcagcaggtagaagatattttggcagggaaggttagcaaaggcctctccaaggaggtgtcgtcatactggaaccagttatacaaaaagccaggaaaagtgttccaggcagaaggaacagccactagagaggctttgaggcaagatagagctt

SEQ ID NO: 944 - DNA, 402 bp, Homo sapiens
gactagtgcaggatgagcctgacaggtcagcagagtcagatggtggagggctagggtaaggggcccatccatattcccctgggaagctcttagatgaacatgttttttgaaagacacaaaaggcaaaaacagacttaaaaagaatcagaaaatctgactagctctgtattatttagagaaattatattcacagttaaaaaaccattcccaaataaaattataggcccagatggtggactggtgaattctaatatcaatcctacaaaaaaattttagaaaatagaggaggatggaacatttcccagcttgttttataagtccaatagtaccctgatacccaaaccaaagaaaaaaaggtcttatgaaaggaaacaactacaaaacagtctccctcgtgagcac

SEQ ID NO: 945 - DNA, 402 bp, Homo sapiens
aaaaggcaaaaacagacttaaaaagaatcagaaaatctgactagctctgtattatttagagaaattatattcacagttaaaaaccattcccaaataaaattataggcccagatggtggactggtgaattctaatatcaatcctacaaaaaaattttagaaaatagaggaggatggaacatttcccagcttgttttataagctccaatagtaccctgatacccaaaccaaagaaaaaaaggtcttatgaaaggaaacaactacaaaacagtctccctcgtgagcacagataaaaaagctttcactaaatattagcaaattgaattcagcaatatataaaaaggatgatacaatacaactatgtgagttttattctaggaaggcaaggttggtttaacattcaa

SEQ ID NO: 946 - DNA, 402 bp, Homo sapiens
acctaaaataaccaaaacatctgaaaaagaacaaagttgaaggactaaacctaccttacttcaagacttaatgaaaatgtgcagtagtcaagatggtagggaattggcataaggatagacatatagatcaatggatcaaaatagagagtcaaaaaaactaaaagtagagctaccatatgatccaacaatcccactgctggcgtatataccccatgtaaaggaaaccagtatatcaaagagatatctgcactcccatgttttttgcagatctgttcataatagccaagatttggaagcaacctaagtgtccatcaacagatgaatggataaagaaaatctggtacttatacacaatggagtacttctgccataaaatagaatgagatttaatcatctacaacg

SEQ ID NO: 947 - DNA, 402 bp, Homo sapiens
aaaacatctgaaaaagaacaaagttgaaggactaaacctaccttacttcaagacttaatgaaaatgtgcagtagtcaagatggtagggaattggcataaggatagacatatagatcaatggatcaaaatagagagtcaaaaaaactaaaagtagagctaccatatgatccaacaatcccactgctggctatataccccatagtaaaggaaaccagtatatcaaagagatatctgcactcccatgttttttgcagatctgttcataatagccaagatttggaagcaacctaagtgtccatcaacagatgaatggataaagaaaatctggtacttatacacaatggagtacttctgccataaaatagaatgagatttaatcatctacaacgtggatggaattgg

SEQ ID NO: 948 - DNA, 402 bp, Homo sapiens
ttcaagacttaatgaaaatgtgcagtagtcaagatggtagggaattggcataaggatagacatatagatcaatggatcaaaatagagagtcaaaaaaactaaaagtagagctaccatatgatccaacaatcccactgctggctatataccccatgtaaaggaaaccagtatatcaaagagatatctgcactcccatgtttgtttgcagatctgttcataatagccaagatttggaagcaacctaagtgtccatcaacagatgaatggataaagaaaatctggtacttatacacaatggagtacttctgccataaaatagaatgagatttaatcatctacaacgtggatggaattggaggtcattacattaagtgaaatgaaccaggcacagaaagacaaaca

SEQ ID NO: 949 - DNA, 402 bp, Homo sapiens
tatcaaagagatatctgcactcccatgttttttgcagatctgttcataatagccaagatttggaagcaacctaagtgtccatcaacagatgaatggataaagaaaatctggtacttatacacaatggagtacttctgccataaaatagaatgagatttaatcatctacaacgtggatggaattggaggtcattacattaaagtgaaatgaaccaggcacagaaagacaaacatcccatgttctctcttatttgttggatctaaaaatcaaaacaatatgaagatagagggcagaaggacggttaccagaggctgggaaggatagtaggggggctgtgggggaagttaggatagtcaatgggtacaaaaaaaatagaatgaatgaataaggcctggtatttgg

SEQ ID NO: 950 - DNA, 402 bp, Homo sapiens
aatgtttgcaaattatataccagatatataaagataccaggataccaaaccaatataaagactggcatccaaaatatataagggacatttataatttaatacaaagataaacaacttcatataaaataggcaaaagatttgatgagatatttaagaaaagaagatatatgaatggccagtaaacccatgaaaggttgctcctatatcactggtcttcaaagaaatgcaaattataactataatgaaatacaattgcacagaatggccacaattaaaaagactgataataccaagcattggcaaagatgtggagcaatagaaactctcatagatagctggcagaaatgtaaatggtacaaacacgttgggaaacattttggcatctttgataaagctcagcac

SEQ ID NO: 951 - DNA, 402 bp, Homo sapiens
attgcacagaatggccacaattaaaaagactgataataccaagcattggcaaagatgtggagcaatagaaactctcatagatagctggcagaaatgtaaatggtacaaacacgttgggaaacattttggcatctttgataaagctcagcacacacttaacatacaacccagaaatcccattccagtcaggcatggtggctctacgcctataatcccagtactttgggaggctgaggcaggcggatcacttgagctcaggtgttcaagaccagactgggcaacatggcgagacactgtctctactaaaaatacaaaaaaaaaaaaaaaaaaagccagacatggtggtaagcacctgtggtcccagctactagggaggctgaggtgggagaattgcttaaccct

SEQ ID NO: 952 - DNA, 402 bp, Homo sapiens
ctgggtgacagagcaagaccctgtctcaaaaaaagaaaaaaagaagaagaaaagaagtcccactcctggatatttacccccaaaagaaaaatatgtaattccataaagacttgtacaaagatgttcatagcagctttattcatagtaatctcaaaacttaaatgacccaaatgtctgtcaacaggacaatgggtaaatacattcatagtctgttcatccaatggaatattactcagcagtaaaaaggaatgttatagttgcatgcagcaatgtgtatgaagctcataaacctcatgctgagtaaatgaagccagacgcaaatgagtttacactgttttactccatttacatgagattttagaaaatacaaactaatctatagtaacagaaattagatctgtg

SEQ ID NO: 953 - DNA, 402 bp, Homo sapiens
tcccagctactccagaggctgaggcaggaggatagcttgagcccaggagttcaagcctgccctgagccataatcactgcaccacactccagcctgggcaacagaacaagacccttcctcaaaaaagcaataaaataaaataaagaaatgcacatgactaacatagggtttattccaggaatgcaggaatagcccagtagcaggagaaagcctattaaataatttatcacattaatatatcaaaagatcaaaccatttgatgctaaaatcacatttgatataatttaccatttattcataataattttcaggattcaattaattaggaataaaatacttcttcagcataatagaaaataccccagcctggtacacagcttcatactttatggtaacacgcgga

SEQ ID NO: 954 - DNA, 402 bp, Homo sapiens
tagcagagaaagcctattaaataatttatcacattaatatatcaaaagatcaaaccatttgatgctaaaatcacatttgatataatttaccatttattcataataattttcaggattcaattaattaggaataaaatacttcttcagcataatagaaaataccccagcctggtacacagcttcatactttatggtaacacagcggagattctcactgaagaaaagatgaggcaagaaaagatgatgaagaaaagatgaggcaagaaaagatgatgtctgcacactgtcagacatcaccactgtttaacatttcctgaaagctcttcaaacacagtgaaacagaaaaggaaatgcgatctaaataggaaaaattacaacattccttgttaatgacatgatttt

SEQ ID NO: 955 - DNA, 402 bp, Homo sapiens
tacattggaagattaatcagatgaaaatagcaaagataattttcaaaaagaagaaaaatggtgggatttgttctaccagatactgaaatatattataaagctgaaactattaaaatattataatatcagagaaggaacaggtagatcaatggaacaaaatagaaatcccaggtacaaataccatcttggttcataataaaagggagcatattgaatagagaggtaatgaatcattaaatgattcttggaaaactggttaactattttggcaataagtaagtaaatattcttactcggtaccataaacacaaaatcactatagatatgtacagttgctttttaactaaaaaagaactaaaaatcatatgtgaatatctgatcaaagaatggaaaaagcataaa

SEQ ID NO: 956 - DNA, 402 bp, Homo sapiens
atcagagaaggaacaggtagatcaatggaacaaaatagaaatcccaggtacaaataccatcttggttcataataaagggagcatattgaatagagaggtaatgaatcattaaatgattcttggaaaactggttaactattttggcaataagtaagtaaatattcttactcggtaccataaacacaaaatcactatagatactgtacagttgctttttaactaaaaaagaactaaaaatcatatgtgaatatctgatcaaagaatggaaaaagcataaaatcaaagttagaaacaattttttaaattattgatggctttacactgtaaatattttaaaattctgcatatcaaaaaataccataaacaaagttgaaaagtaagtgacaaacttgtttttaaaaa

SEQ ID NO: 957 - DNA, 402 bp, Homo sapiens
gatcaatggaacaaaatagaaatcccaggtacaaataccatcttggttcataataaagggagcatattgaatagagaggtaatgaatcattaaatgattcttggaaaactggttaactattttggcaataagtaagtaaatattcttactcggtaccataaacacaaaatcactatagatatgtacagttgctttttaacataaaaaagaactaaaaatcatatgtgaatatctgatcaaagaatggaaaaagcataaaatcaaagttagaaacaattttttaaattattgatggctttacactgtaaatattttaaaattctgcatatcaaaaaataccataaacaaagttgaaaagtaagtgacaaacttgtttttaaaaatctgcaatttatgatgaca

SEQ ID NO: 958 - DNA, 402 bp, Homo sapiens
ttaaaaatctgcaatttatgatgacagaaaggattgatattcctcagtagacattcatcttaacaaaggcaagagtcatattcatcgtgcttatctttgtatttctttgacacaatatctagcacatggtagatgcgtaaaaatacctttaaataaattaaaaatctattaagatattttaacaatttaataaatctacactgaatatataaagagctctcacaatccagtcagaaataggtgaacacaatgagcaaagcagatgaaaaaatagttcatgggaaaataaataaaaatagtcaatacatatattagagacctcactaagaaagtaatgtatatctttaaaaacaatgaattatcacttatctattaaattgcaaaggttttgtaaagtctttg

SEQ ID NO: 959 - DNA, 402 bp, Homo sapiens
cgaatatataaagagctctcacaatccagtcagaaataggtgaacacaatgagcaaagcagatgaaaaaatagttcatgggaaaataaataaaaatagtcaatacatatattagagacctcactaagaaagtaatgtatatctttaaaaacaatgaattatcacttatctattaaattgcaaaggttttgtaaagtctttgtttgaaggttggtggaaagtggtttttcatacatagttgctgaaagtgttctgataataaactttctaaaaggtatttgaggaatatgtatcaaaagcattgaaagttatgcatcccattctccttataaaaccacaccttggtatatgtcccaaggaaataaagaatagacacaaagacttaaaagcaagaagagtcttc

SEQ ID NO: 960 - DNA, 402 bp, Homo sapiens
acacaatgagcaaagcagatgaaaaaatagttcatgggaaaataaataaaaatagtcaatacatatattagagacctcactaagaaagtaatgtatatctttaaaaacaatgaattatcacttatctattaaattgcaaaggttttgtaaagtctttgttgaaggttggtggaaagtggtttttcatacatagttgctgaagagtgttctgataataaactttctaaaaggtatttgaggaatatgtatcaaaagcattgaaagttatgcatcccattctccttataaaaccacaccttggtatatgtcccaaggaaataaagaatagacacaaagacttaaaagcaagaagagtcttcaggtaatagtgccccagaatgtgatagccatgatatccactaa

SEQ ID NO: 961 - DNA, 402 bp, Homo sapiens
agtctttgttgaaggttggtggaaagtggtttttcatacatagttgctgaaagtgttctgataataaactttctaaaaggtatttgaggaatatgtatcaaaagcattgaaagttatgcatcccattctccttataaaaccacaccttggtatatgtcccaaggaaataaagaatagacacaaagacttaaaagcaagaaagagtcttcaggtaatagtgccccagaatgtgatagccatgatatccactaacagcagatttgtaaaatgaattacagtaaatacatataatggaatagccagtggccacttaaaatcatgaaagagtaatataaaataaacattagtatgatatattaaatttttaaatatattacattttaaattgataaagtggtatgt

SEQ ID NO: 962 - DNA, 402 bp, Homo sapiens
cctactccctttttgtaatttgcaaactaggcagaattctccccattaatctatcagacctctctggagggcagagttaataaagtaccccttaaaagaaaaagaaagtgtggataagtagcttctcagaaaagatagcaggatcttcccctggcaatcatttggagataacctcatccaagttgtaggctatgaaaatcactgagagagcaacaaaattgctctttctgtgattaaaaaaaaatatcagacaggaaaagcatcaatggccatgtagatgtgaagggcttgtaaagcacacatttaaaaataaacacatggatagagacatctatttcctcgttctatctgttgagggcacctcagagcaatgacatccctgtagcagtgagcatactagta

SEQ ID NO: 963 - DNA, 402 bp, Homo sapiens
catggatagagacatctatttcctcgttctatctgttgagggcacctcagagcaatgacatccctgtagcagtgagcatactagtacctagactttgatttctaaataccattcttcgataaacagaaccagtcttcttgaagaatagttgattctaagattgggaaagagaaaatacaagatgagcctggagtactttaattatgctgaaggtataaaagtgcttaaaaaaaaaaaactgcaggagtcaacctgaaggagttcccaatagtcagaatgaaagcaatttgagcaaaattaaaaattattaagtactggattataacctgtaaaatatggtaaatgcccacaagtccatgctaatgtaaataaacaactgaatacataaataaatgcaggaga

SEQ ID NO: 964 - DNA, 402 bp, Homo sapiens
tcatatcaaaagtgtgaggtcctgaaagacaaggaaacaaagaaactcaggctgggcatggtggctcatgcctataatcccagcactttgggaggcagaggcaggaagatcacttgagtccaagagtttgagaccagcctgggcaacatggcaaaaccccatctctacaaaaaattagccaggtgtggtggcacttgcctagtagtcccagctacttgagaggctgaggcgggaggatcacttgaacccgggaggtcgaggctgcagtgacggggattgtgccactgcactccagcctgggtgacagagcaagaacctgtctcaaaaaaaaaaaaaaagaaaaaagaaaaaaagaatgagaaactcatacagattagaagagactaaggagacacaacaaat

SEQ ID NO: 965 - DNA, 402 bp, Homo sapiens
ctgcactccagcctgggccacagagcgagactccgtctcaaaaaaaaaaaaaaaaaaaaaaaaaaaaaagaaaagctgataaaatttgaataagccctgtagtttagttaataatagtgaagccatgttaatttcctgggtttggtcattgtgctctggttatgcaagttgttaacattagaggagactgagtgaaaggtagtgcatgaactctctgtactaattttgtaaattttctgtaagtctaaaattattcataatatgcaaaaattaaacaaaaaataaaataaaataagcacatggaatgagactgtcccctgggtctctgtagaaaccaggtcaaacatcccaaatgctcttttacccccattctgagttgggccagaatggtcagaataatgg

SEQ ID NO: 966 - DNA, 402 bp, Homo sapiens
gtctcaaaaaaaaaaaaaaaaaaaaaaaaaaaaaagaaaagctgataaaatttgaataagccctgtagtttagttaataatagtgaagccatgttaatttcctgggtttggtcattgtgctctggttatgcaagttgttaacattagaggagactgagtgaaaggtatgcatgaactctctgtactaattttgtaaatttctctgtaagtctaaaattattcataatatgcaaaaattaaacaaaaaataaaataaaataagcacatggaatgagactgtcccctgggtctctgtagaaaccaggtcaaacatcccaaatgctcttttacccccattctgagttgggccagaatggtcagaataatggttcccaatgtaccttgataaacacggaaactctc

SEQ ID NO: 967 - DNA, 402 bp, Homo sapiens
tatgcatgaactctctgtactaattttgtaaattttctgtaagtctaaaattattcataatatgcaaaaattaaacaaaaaataaaataaaataagcacatggaatgagactgtcccctgggtctctgtagaaaccaggtcaaacatcccaaatgctcttttacccccattctgagttgggccagaatggtcagaataatgtgttcccaatgtaccttgataaacacggaaactctcaggaccgagtcctaaggttctctgattcaataggtttggagtggacttgagaactgatctttttaataagggcctcagtctgtggaactattggcctcatgtgccctgtggataatcttggctgttggttcatttttcttaactgaaaacagtggcagaaactat

SEQ ID NO: 968 - DNA, 402 bp, Homo sapiens
ttgtctaccatctcctctctaagaagggctcccacaatatatccccttctgcttgcttctaactccctatcacctgctaaagaaggacctcaccttttaatcactttcattgccaaggggcacaaggagccccaaactctgtcacctaggaagagcttgacctcatggtttccacactgtgtgcttttatgtccctgctcctaggagatgatggacattgtcaaagccatctatgacatgatggggaaatacacatatcctgtgctcaaagaggacactccaaggcagcatgtggacgtcttcttccaggtaagtgcacacaccctgcacatgagctgtaagcccagcctagatcaagtcaacccacgagcatctgagcaaatgatttgtgtccaaccctgt

SEQ ID NO: 969 - DNA, 402 bp, Homo sapiens
acaccctgcacatgagctgtaagcccagcctagatcaagtcaacccacgagcatctgagcaaatgatttgtgtccaaccctgtactaagcatggttggtaacagaaaagaattataagatacattgtcctcaagaaacagatgatctccttaagctgcaagtgtacatgacagaagagaacaagaaagtatattattaaactgctagtggtatagtatgaactctaaatccataaaaatttggggatcagggtaaacacgaaagacttcattaattacaactgtggaggtgttaagcatttgtgtctgggaagtaaggggaaataagattggaaactaggatagggccagattatgagacctttaaatggaagagtttggccttgctctggtacaggatggg

SEQ ID NO: 970 - DNA, 402 bp, Homo sapiens
tcaacccacgagcatctgagcaaatgatttgtgtccaaccctgtactaagcatggttggtaacagaaaagaattataagatacattgtcctcaagaaacagatgatctccttaagctgcaagtgtacatgacagaagagaacaagaaagtatattattaaacgctagtggtatagtatgaactctaaatccataaaaattctggggatcagggtaaacacgaaagacttcattaattacaactgtggaggtgttaagcatttgtgtctgggaagtaaggggaaataagattggaaactaggatagggccagattatgagacctttaaatggaagagtttggccttgctctggtacaggatgggcagctagtgctgatccttgactaagggagtggtataatc

SEQ ID NO: 971 - DNA, 402 bp, Homo sapiens
accagcaacaactgtgaagtccacagttccactcctcaacctgacctgcagttggtcttggctaagcacaagactgaacagagagcctaagtaggggtctgggggcatgtgaaaactcagagggggtctctgtgaaaatagacttcccgagagggcaacaccattattttttagcctgcctctggcttgatgacccatttcgccagactacaaggaagcagctggggggaaaaaaacctacaattgtgtgattctcaaaccacagtgtgcataaaaattgcctggaatgattctgaaaatgcatatttccaggcctcaatcccagagactctagatctgggtcactttaacacaaatgtcctggaccaatgcttctaacactttaatgtgtgaaacaatatc

SEQ ID NO: 972 - DNA, 402 bp, Homo sapiens
cagatactgagcccccatcaagtttcaagcacatacataaacatcacagccaccctgttatgtagatgtcctatgtgcagggtgatatccaagatatttaacaactagaatggaatgaacactgacccccttgggggtgagttctcactgttaattcccttgagagctggttgtaaaacagcctggcaccttccccacctcgcaaccttgattcctctcccaccatgggatctctgcacacccagcttcccttcacattccactgtgagtggaagcagcctgaaaccctcaccagatgcagatgcccagctgaactttccagctgccagaataatgagccaaataagcctatactgacattaaccttttcatttctgatattgataatttgaaaagcagtct

SEQ ID NO: 973 - DNA, 402 bp, Homo sapiens
tacacaccaactcttgggacagaaacaccttttacactttggaagaattctctgctgaagactttctatggaacccagcatcatgtggctcagtctctgattgccaactcttcctctttcttcttcttgagagagacaagatgaaatttgagtttgttttggaagcatgctcatctcctcacactgctgccctatggaaggttccctctgcttaagcttaaacagtagtgcacaaaatatgctgcttacgtgcccccagcccactgcctccaagtcaggcagaccttggtgaatctggaagcaagaggacctgagccagatgcacaccatctctgatggcctcccaaaccaatgtgcctgtttctcttcctttggtgggaagaatgagagttatccagaaca

SEQ ID NO: 974 - DNA, 402 bp, Homo sapiens
gcagaccttggtgaatctggaagcaagaggacctgagccagatgcacaccatctctgatggcctcccaaaccaatgtgcctgtttctcttcctttggtgggaagaatgagagttatccagaacaattaggatctgtcatgaccagattgggagagccagcacctaacatatgtgggataggactgaattattaagcatgactattgtctgatgacccaaactgcccatgtcatttgtttccagaaacgaggaccaataattctctcacactggcatttgtgctggtagtacaagtcctttaatatgtccaggaagggagccattgcccagtggtccatatctccaccacatcccctgcttgagcccagcgctgcatgtccctcccaagaagtccagaatgcc

SEQ ID NO: 975 - DNA, 402 bp, Homo sapiens
acccaattattagtgcagttgtccctccatatgtgtgaaggatcagtcccaggactctccataccaaaatctgcagatactcaagtcccacagctagccctgagggactcgtgttttcagaaaatttggcctccatatatgcaggtttcacatcctataaatactgcattttctatcacttttggttgaaaacaatctgcagtgtaagtggacccaataagtttaaactcatgttgttggagggtcaactgtacttacgttgtgccaggcctgtgccaggcaatgacttcatcctccccagcccccaagccttccccagcaaacatccaatccaaatgcaaatactgtgaccaaatgcaaatgcaacttcgagacaagacccttcacaacactttgcttcca

SEQ ID NO: 976 - DNA, 402 bp, Homo sapiens
agttgtccctccatatgtgtgaaggatcagtcccaggactctccataccaaaatctgcagatactcaagtcccacagctagccctgagggactcgtgttttcagaaaatttggcctccatatatgcaggtttcacatcctataaatactgcattttctatcacttttggttgaaaacaatctgcatgtaagtggacccaagtaagtttaaactcatgttgttggagggtcaactgtacttacgttgtgccaggcctgtgccaggcaatgacttcatcctccccagcccccaagccttccccagcaaacatccaatccaaatgcaaatactgtgaccaaatgcaaatgcaacttcgagacaagacccttcacaacactttgcttccaacaagattgccacttc

SEQ ID NO: 977 - DNA, 402 bp, Homo sapiens
tgggggttctggtaatcctggaaggcttcctgtcagaggtgggccgggggaaacgcgggcaggagaagggaagtctcgctcaggggagtggtgtgcatggggcagaggctgccagggacgctgaaggctgatagccgggttggcgcggaaatgggacgccgcagggtgggacaggcgggagggatgggatgggcagggtggtgatgccggacgaaggaaacgggcctgcccggcaggtggcagagagccacagaagagctccgagggggtggtgcgtgagatggcgctgcaggctggaaaggggctgcaggcagggtgcctccagagaccgcaagagaacagcttgcgagggaccgtgggaacttcaaggaaccgcaccgccctcctggaccacccgagaaa

SEQ ID NO: 978 - DNA, 402 bp, Homo sapiens
ggaaggcttcctgtcagaggtgggccgggggaaacgcgggcaggagaagggaagtctcgctcaggggagtggtgtgcatggggcagaggctgccagggacgctgaaggctgatagccgggttggcgcggaaatgggacgccgcagggtgggacaggcgggagggatgggatgggcagggtgtgatgccggacgaaggaaactgggcctgcccggcaggtggcagagagccacagaagagctccgagggggtggtgcgtgagatggcgctgcaggctggaaaggggctgcaggcagggtgcctccagagaccgcaagagaacagcttgcgagggaccgtgggaacttcaaggaaccgcaccgccctcctggaccacccgagaaaacaggggaagtgggcgaat

SEQ ID NO: 979 - DNA, 402 bp, Homo sapiens
tctcgctcaggggagtggtgtgcatggggcagaggctgccagggacgctgaaggctgatagccgggttggcgcggaaatgggacgccgcagggtgggacaggcgggagggatgggatgggcagggtgtgatgccggacgaaggaaacgggcctgcccggcaggtggcagagagccacagaagagctccgagggggtggtgacgtgagatggcgctgcaggctggaaaggggctgcaggcagggtgcctccagagaccgcaagagaacagcttgcgagggaccgtgggaacttcaaggaaccgcaccgccctcctggaccacccgagaaaacaggggaagtgggcgaatgagtagaccaaagtactcatgacagggcaggagcaagtgagagaccctggagga
